United States Patent Application Publication US 2026/0226433 A1, published August 6, 2026 (application 19/429,035).

The application's sequence listing, which the Patent Office published only in electronic form, follows.

SEQUENCE LISTING (438 sequences)

SEQ ID NO: 1 - DNA, 60 bp, synthetic construct
  source 1..60: mol_type = other DNA
gcagccatatgactttaaatattgaggatccccatcgtttacatgagacatcaaaagaac

SEQ ID NO: 2 - DNA, 61 bp, synthetic construct
  source 1..61: mol_type = other DNA
ccatatgactttaaatattgaggatgagcatttattacatgagacatcaaaagaacccgac

SEQ ID NO: 3 - DNA, 61 bp, synthetic construct
  source 1..61: mol_type = other DNA
ccatatgactttaaatattgaggatgagcatgcgttacatgagacatcaaaagaacccgac

SEQ ID NO: 4 - DNA, 55 bp, synthetic construct
  source 1..55: mol_type = other DNA
gcgtagaagacatccatccgacttatcctaatccttataatctgttatcaggcct

SEQ ID NO: 5 - DNA, 49 bp, synthetic construct
  source 1..49: mol_type = other DNA
ccgactgtacctaatccttataatctggcgtcaggcctgcccccatcgc

SEQ ID NO: 6 - DNA, 48 bp, synthetic construct
  source 1..48: mol_type = other DNA
cgactgtacctaatccttataatctgttattcggcctgcccccatcgc

SEQ ID NO: 7 - DNA, 53 bp, synthetic construct
  source 1..53: mol_type = other DNA
gactgtacctaatccttataatctgttatcatctctgcccccatcgcaccaat

SEQ ID NO: 8 - DNA, 48 bp, synthetic construct
  source 1..48: mol_type = other DNA
cagtattagacttgaaagacgcgttcgtatgcctgcgtctgcacccaa

SEQ ID NO: 9 - DNA, 49 bp, synthetic construct
  source 1..49: mol_type = other DNA
gtattagacttgaaagacgcgttctttgcgctgcgtctgcacccaacgt

SEQ ID NO: 10 - DNA, 48 bp, synthetic construct
  source 1..48: mol_type = other DNA
ccgctgtttgcgttcgaatgggaggatcctgaaatgggaatttcgggt

SEQ ID NO: 11 - DNA, 52 bp, synthetic construct
  source 1..52: mol_type = other DNA
gccccagggctttaaaaacagcgcgacattgttcgatgaagcacttcaccgt

SEQ ID NO: 12 - DNA, 52 bp, synthetic construct
  source 1..52: mol_type = other DNA
gccccagggctttaaaaacagcttaacattgttcgatgaagcacttcaccgt

SEQ ID NO: 13 - DNA, 52 bp, synthetic construct
  source 1..52: mol_type = other DNA
gccccagggctttaaaaacagccatacattgttcgatgaagcacttcaccgt

SEQ ID NO: 14 - DNA, 53 bp, synthetic construct
  source 1..53: mol_type = other DNA
taaccaagccctttgagctgttctctgatgaaaaacagggatatgcaaaagga

SEQ ID NO: 15 - DNA, 57 bp, synthetic construct
  source 1..57: mol_type = other DNA
ccctttgagctgttcgttgatgaaaaattaggatatgcaaaaggagtattaacccaa

SEQ ID NO: 16 - DNA, 62 bp, synthetic construct
  source 1..62: mol_type = other DNA
gctgttcgttgatgaaaaacagggaattgcaaaaggagtattaacccaaaagttaggcccgt

SEQ ID NO: 17 - DNA, 57 bp, synthetic construct
  source 1..57: mol_type = other DNA
gatgaaaaacagggatatgcaaaaggatctttaacccaaaagttaggcccgtggcgt

SEQ ID NO: 18 - DNA, 55 bp, synthetic construct
  source 1..55: mol_type = other DNA
cctgttgcttacttgagtaaaaaattggatttagtcgcagcaggatggccaccgt

SEQ ID NO: 19 - DNA, 52 bp, synthetic construct
  source 1..52: mol_type = other DNA
caattgccgttttgacaaaggatgcatctaagttgacgatgggtcaaccctt

SEQ ID NO: 20 - DNA, 57 bp, synthetic construct
  source 1..57: mol_type = other DNA
gttttgacaaaggatgcaggtaagttgtgtatgggtcaacccttaaacatcttggct

SEQ ID NO: 21 - DNA, 49 bp, synthetic construct
  source 1..49: mol_type = other DNA
agttgacgatgggtcaacccttaacaatcttggctccacatgctgtaga

SEQ ID NO: 22 - DNA, 48 bp, synthetic construct
  source 1..48: mol_type = other DNA
cgatgggtcaacccttaaacatccatgctccacatgctgtagaagcgt

SEQ ID NO: 23 - DNA, 51 bp, synthetic construct
  source 1..51: mol_type = other DNA
gatgggtcaacccttaaacatcttgtctccacatgctgtagaagcgttagt

SEQ ID NO: 24 - DNA, 52 bp, synthetic construct
  source 1..52: mol_type = other DNA
actatcaggcgcttctgcttgataacgatcgtgtacaatttggaccagttgt

SEQ ID NO: 25 - DNA, 58 bp, synthetic construct
  source 1..58: mol_type = other DNA
cttgatacggatcgtgtacaatttggatctgttgtagctttgaatccagctactttgc

SEQ ID NO: 26 - DNA, 56 bp, synthetic construct
  source 1..56: mol_type = other DNA
gatcgtgtacaatttggaccagttgtatatttgaatccagctactttgcttcccct

SEQ ID NO: 27 - DNA, 54 bp, synthetic construct
  source 1..54: mol_type = other DNA
gcttccccttccagaagaaggaacacagcacaattgtttagatattctggccga

SEQ ID NO: 28 - DNA, 53 bp, synthetic construct
  source 1..53: mol_type = other DNA
gacttcagcacaattgtttagatattctgcaagaggcacatgggacgcgccct

SEQ ID NO: 29 - DNA, 55 bp, synthetic construct
  source 1..55: mol_type = other DNA
cagcacaattgtttagatattctggccgagtaacaaagcccgaaaggaagctgag

SEQ ID NO: 30 - DNA, 45 bp, synthetic construct
  source 1..45: mol_type = other DNA
gtttagatattctggccgaggcacgtgggacgcgccctgatttga

SEQ ID NO: 31 - DNA, 46 bp, synthetic construct
  source 1..46: mol_type = other DNA
tagatattctggccgaggcacatgcgacgcgccctgatttgacgga

SEQ ID NO: 32 - DNA, 43 bp, synthetic construct
  source 1..43: mol_type = other DNA
ctggccgaggcacatgggtctcgccctgatttgacggatcagc

SEQ ID NO: 33 - DNA, 49 bp, synthetic construct
  source 1..49: mol_type = other DNA
ctgatgccgaccatacatggtatttaggcggcagtagtcttcttcaaga

SEQ ID NO: 34 - DNA, 53 bp, synthetic construct
  source 1..53: mol_type = other DNA
gatgccgaccatacatggtatactaacggcagtagtcttcttcaagaggggca

SEQ ID NO: 35 - DNA, 53 bp, synthetic construct
  source 1..53: mol_type = other DNA
catggtatactggcggcagtagtgtacttcaagaggggcaacgcaaggcggga

SEQ ID NO: 36 - DNA, 53 bp, synthetic construct
  source 1..53: mol_type = other DNA
catggtatactggcggcagtagttatcttcaagaggggcaacgcaaggcggga

SEQ ID NO: 37 - DNA, 47 bp, synthetic construct
  source 1..47: mol_type = other DNA
atactggcggcagtagtcttcttgtagaggggcaacgcaaggcggga

SEQ ID NO: 38 - DNA, 44 bp, synthetic construct
  source 1..44: mol_type = other DNA
ctggcggcagtagtcttcttcaatctgggcaacgcaaggcggga

SEQ ID NO: 39 - DNA, 46 bp, synthetic construct
  source 1..46: mol_type = other DNA
cttcaagaggggcaacgcaagtaacaaagcccgaaaggaagctgag

SEQ ID NO: 40 - DNA, 43 bp, synthetic construct
  source 1..43: mol_type = other DNA
gagaccgaagttatctgggcctgggcgttacccgcgggaacat

SEQ ID NO: 41 - DNA, 56 bp, synthetic construct
  source 1..56: mol_type = other DNA
ttgaatgtctacaccaactcacgttatacatttgcaacagcgcattggcatggcga

SEQ ID NO: 42 - DNA, 51 bp, synthetic construct
  source 1..51: mol_type = other DNA
cgttatgcttttgcaacagcgcatttacatggcgaaatttaccgccgccgt

SEQ ID NO: 43 - DNA, 51 bp, synthetic construct
  source 1..51: mol_type = other DNA
ccgccgccgtggtctggggactagtgagggtaaggaaattaaaaataaaga

SEQ ID NO: 44 - DNA, 58 bp, synthetic construct
  source 1..58: mol_type = other DNA
gccgtggtctgctgactagttctggtaaggaaattaaaaataaagatgagattcttgc

SEQ ID NO: 45 - DNA, 64 bp, synthetic construct
  source 1..64: mol_type = other DNA
gactagtgagggtaaggaaattaaaaataaacccgagattcttgcgttgttaaaagctttattc

SEQ ID NO: 46 - DNA, 64 bp, synthetic construct
  source 1..64: mol_type = other DNA
gactagtgagggtaaggaaattaaaaataaacgtgagattcttgcgttgttaaaagctttattc

SEQ ID NO: 47 - DNA, 63 bp, synthetic construct
  source 1..63: mol_type = other DNA
tgagggtaaggaaattaaaaataaagatgaggtacttgcgttgttaaaagctttattcttacc

SEQ ID NO: 48 - DNA, 69 bp, synthetic construct
  source 1..69: mol_type = other DNA
gggtaaggaaattaaaaataaagatgagattcttttattgttaaaagctttattcttaccaaaacgcct

SEQ ID NO: 49 - DNA, 69 bp, synthetic construct
  source 1..69: mol_type = other DNA
gggtaaggaaattaaaaataaagatgagattcttcgtttgttaaaagctttattcttaccaaaacgcct

SEQ ID NO: 50 - DNA, 60 bp, synthetic construct
  source 1..60: mol_type = other DNA
tgcgttgttaaaagctttattcttaccaaaaacactttcgatcattcattgcccggggca

SEQ ID NO: 51 - DNA, 45 bp, synthetic construct
  source 1..45: mol_type = other DNA
accccttaacaaaaacagggacgtctttcaactgggggccagacc

SEQ ID NO: 52 - DNA, 45 bp, synthetic construct
  source 1..45: mol_type = other DNA
accccttaacaaaaacagggacggagttcaactgggggccagacc

SEQ ID NO: 53 - DNA, 58 bp, synthetic construct
  source 1..58: mol_type = other DNA
ctttgcttccccttccagaagaagcgcttcagcacaattgtttagatattctggccga

SEQ ID NO: 54 - DNA, 58 bp, synthetic construct
  source 1..58: mol_type = other DNA
ctttgcttccccttccagaagaaaaccttcagcacaattgtttagatattctggccga

SEQ ID NO: 55 - DNA, 44 bp, synthetic construct
  source 1..44: mol_type = other DNA
caaaagggtcactcagcggaggtacgtggaaaccgtatggcgga

SEQ ID NO: 56 - DNA, 52 bp, synthetic construct
  source 1..52: mol_type = other DNA
ggtatttgctgaaagaaggtcaacgtcgtattactgatgcgcgtaaggagac

SEQ ID NO: 57 - DNA, 48 bp, synthetic construct
  source 1..48: mol_type = other DNA
ttggattactgatgcgcgtaaggaggatgtaatggggcagcctacgcc

SEQ ID NO: 58 - DNA, 51 bp, synthetic construct; identical to SEQ ID NO: 42
  source 1..51: mol_type = other DNA

SEQ ID NO: 59 - DNA, 60 bp, synthetic construct
  source 1..60: mol_type = other DNA
gttcttttgatgtctcatgtaaacgatggggatcctcaatatttaaagtcatatggctgc

SEQ ID NO: 60 - DNA, 61 bp, synthetic construct
  source 1..61: mol_type = other DNA
gtcgggttcttttgatgtctcatgtaataaatgctcatcctcaatatttaaagtcatatgg

SEQ ID NO: 61 - DNA, 61 bp, synthetic construct
  source 1..61: mol_type = other DNA
gtcgggttcttttgatgtctcatgtaacgcatgctcatcctcaatatttaaagtcatatgg

SEQ ID NO: 62 - DNA, 55 bp, synthetic construct
  source 1..55: mol_type = other DNA
aggcctgataacagattataaggattaggataagtcggatggatgtcttctacgc

SEQ ID NO: 63 - DNA, 49 bp, synthetic construct
  source 1..49: mol_type = other DNA
gcgatgggggcaggcctgacgccagattataaggattaggtacagtcgg

SEQ ID NO: 64 - DNA, 48 bp, synthetic construct
  source 1..48: mol_type = other DNA
gcgatgggggcaggccgaataacagattataaggattaggtacagtcg

SEQ ID NO: 65 - DNA, 53 bp, synthetic construct
  source 1..53: mol_type = other DNA
attggtgcgatgggggcagagatgataacagattataaggattaggtacagtc

SEQ ID NO: 66 - DNA, 48 bp, synthetic construct
  source 1..48: mol_type = other DNA
ttgggtgcagacgcaggcatacgaacgcgtctttcaagtctaatactg

SEQ ID NO: 67 - DNA, 49 bp, synthetic construct
  source 1..49: mol_type = other DNA
acgttgggtgcagacgcagcgcaaagaacgcgtctttcaagtctaatac

SEQ ID NO: 68 - DNA, 48 bp, synthetic construct
  source 1..48: mol_type = other DNA
acccgaaattcccatttcaggatcctcccattcgaacgcaaacagcgg

SEQ ID NO: 69 - DNA, 52 bp, synthetic construct
  source 1..52: mol_type = other DNA
acggtgaagtgcttcatcgaacaatgtcgcgctgtttttaaagccctggggc

SEQ ID NO: 70 - DNA, 52 bp, synthetic construct
  source 1..52: mol_type = other DNA
acggtgaagtgcttcatcgaacaatgttaagctgtttttaaagccctggggc

SEQ ID NO: 71 - DNA, 52 bp, synthetic construct
  source 1..52: mol_type = other DNA
acggtgaagtgcttcatcgaacaatgtatggctgtttttaaagccctggggc

SEQ ID NO: 72 - DNA, 53 bp, synthetic construct
  source 1..53: mol_type = other DNA
tccttttgcatatccctgtttttcatcagagaacagctcaaagggcttggtta

SEQ ID NO: 73 - DNA, 57 bp, synthetic construct
  source 1..57: mol_type = other DNA
ttgggttaatactccttttgcatatcctaatttttcatcaacgaacagctcaaaggg

SEQ ID NO: 74 - DNA, 62 bp, synthetic construct
  source 1..62: mol_type = other DNA
acgggcctaacttttgggttaatactccttttgcaattccctgtttttcatcaacgaacagc

SEQ ID NO: 75 - DNA, 57 bp, synthetic construct
  source 1..57: mol_type = other DNA
acgccacgggcctaacttttgggttaaagatccttttgcatatccctgtttttcatc

SEQ ID NO: 76 - DNA, 55 bp, synthetic construct
  source 1..55: mol_type = other DNA
acggtggccatcctgctgcgactaaatccaattttttactcaagtaagcaacagg

SEQ ID NO: 77 - DNA, 52 bp, synthetic construct
  source 1..52: mol_type = other DNA
aagggttgacccatcgtcaacttagatgcatcctttgtcaaaacggcaattg

SEQ ID NO: 78 - DNA, 57 bp, synthetic construct
  source 1..57: mol_type = other DNA
agccaagatgtttaagggttgacccatacacaacttacctgcatcctttgtcaaaac

SEQ ID NO: 79 - DNA, 49 bp, synthetic construct
  source 1..49: mol_type = other DNA
tctacagcatgtggagccaagattgttaagggttgacccatcgtcaact

SEQ ID NO: 80 - DNA, 48 bp, synthetic construct
  source 1..48: mol_type = other DNA
acgcttctacagcatgtggagcatggatgtttaagggttgacccatcg

SEQ ID NO: 81 - DNA, 51 bp, synthetic construct
  source 1..51: mol_type = other DNA
actaacgcttctacagcatgtggagacaagatgtttaagggttgacccatc

SEQ ID NO: 82 - DNA, 52 bp, synthetic construct
  source 1..52: mol_type = other DNA
acaactggtccaaattgtacacgatcgttatcaagcagaagcgcctgatagt

SEQ ID NO: 83 - DNA, 58 bp, synthetic construct
  source 1..58: mol_type = other DNA
gcaaagtagctggattcaaagctacaacagatccaaattgtacacgatccgtatcaag

SEQ ID NO: 84 - DNA, 56 bp, synthetic construct
  source 1..56: mol_type = other DNA
aggggaagcaaagtagctggattcaaatatacaactggtccaaattgtacacgatc

SEQ ID NO: 85 - DNA, 54 bp, synthetic construct
  source 1..54: mol_type = other DNA
tcggccagaatatctaaacaattgtgctgtgttccttcttctggaaggggaagc

SEQ ID NO: 86 - DNA, 53 bp, synthetic construct
  source 1..53: mol_type = other DNA
agggcgcgtcccatgtgcctcttgcagaatatctaaacaattgtgctgaagtc

SEQ ID NO: 87 - DNA, 55 bp, synthetic construct
  source 1..55: mol_type = other DNA
ctcagcttcctttcgggctttgttactcggccagaatatctaaacaattgtgctg

SEQ ID NO: 88 - DNA, 45 bp, synthetic construct
  source 1..45: mol_type = other DNA
tcaaatcagggcgcgtcccacgtgcctcggccagaatatctaaac

SEQ ID NO: 89 - DNA, 46 bp, synthetic construct
  source 1..46: mol_type = other DNA
tccgtcaaatcagggcgcgtcgcatgtgcctcggccagaatatcta

SEQ ID NO: 90 - DNA, 43 bp, synthetic construct
  source 1..43: mol_type = other DNA
gctgatccgtcaaatcagggcgagacccatgtgcctcggccag

SEQ ID NO: 91 - DNA, 49 bp, synthetic construct
  source 1..49: mol_type = other DNA
tcttgaagaagactactgccgcctaaataccatgtatggtcggcatcag

SEQ ID NO: 92 - DNA, 53 bp, synthetic construct
  source 1..53: mol_type = other DNA
tgcccctcttgaagaagactactgccgttagtataccatgtatggtcggcatc

SEQ ID NO: 93 - DNA, 53 bp, synthetic construct
  source 1..53: mol_type = other DNA
tcccgccttgcgttgcccctcttgaagtacactactgccgccagtataccatg

SEQ ID NO: 94 - DNA, 53 bp, synthetic construct
  source 1..53: mol_type = other DNA
tcccgccttgcgttgcccctcttgaagataactactgccgccagtataccatg

SEQ ID NO: 95 - DNA, 47 bp, synthetic construct
  source 1..47: mol_type = other DNA
tcccgccttgcgttgcccctctacaagaagactactgccgccagtat

SEQ ID NO: 96 - DNA, 44 bp, synthetic construct
  source 1..44: mol_type = other DNA
tcccgccttgcgttgcccagattgaagaagactactgccgccag

SEQ ID NO: 97 - DNA, 46 bp, synthetic construct
  source 1..46: mol_type = other DNA
ctcagcttcctttcgggctttgttacttgcgttgcccctcttgaag

SEQ ID NO: 98 - DNA, 43 bp, synthetic construct
  source 1..43: mol_type = other DNA
atgttcccgcgggtaacgcccaggcccagataacttcggtctc

SEQ ID NO: 99 - DNA, 56 bp, synthetic construct
  source 1..56: mol_type = other DNA
tcgccatgccaatgcgctgttgcaaatgtataacgtgagttggtgtagacattcaa

SEQ ID NO: 100 - DNA, 51 bp, synthetic construct
  source 1..51: mol_type = other DNA
acggcggcggtaaatttcgccatgtaaatgcgctgttgcaaaagcataacg

SEQ ID NO: 101 - DNA, 51 bp, synthetic construct
  source 1..51: mol_type = other DNA
tctttatttttaatttccttaccctcactagtccccagaccacggcggcgg

SEQ ID NO: 102 - DNA, 58 bp, synthetic construct
  source 1..58: mol_type = other DNA
gcaagaatctcatctttatttttaatttccttaccagaactagtcagcagaccacggc

SEQ ID NO: 103 - DNA, 64 bp, synthetic construct
  source 1..64: mol_type = other DNA
gaataaagcttttaacaacgcaagaatctcacgtttatttttaatttccttaccctcactagtc

SEQ ID NO: 104 - DNA, 64 bp, synthetic construct
  source 1..64: mol_type = other DNA
gaataaagcttttaacaacgcaagaatctcgggtttatttttaatttccttaccctcactagtc

SEQ ID NO: 105 - DNA, 63 bp, synthetic construct
  source 1..63: mol_type = other DNA
ggtaagaataaagcttttaacaacgcaagtacctcatctttatttttaatttccttaccctca

SEQ ID NO: 106 - DNA, 69 bp, synthetic construct
  source 1..69: mol_type = other DNA
aggcgttttggtaagaataaagcttttaacaataaaagaatctcatctttatttttaatttccttaccc

SEQ ID NO: 107 - DNA, 69 bp, synthetic construct
  source 1..69: mol_type = other DNA
aggcgttttggtaagaataaagcttttaacaaacgaagaatctcatctttatttttaatttccttaccc

SEQ ID NO: 108 - DNA, 60 bp, synthetic construct
  source 1..60: mol_type = other DNA
tgccccgggcaatgaatgatcgaaagtgtttttggtaagaataaagcttttaacaacgca

SEQ ID NO: 109 - DNA, 45 bp, synthetic construct
  source 1..45: mol_type = other DNA
ggtctggcccccagttgaaagacgtccctgtttttgttaaggggt

SEQ ID NO: 110 - DNA, 45 bp, synthetic construct
  source 1..45: mol_type = other DNA
ggtctggcccccagttgaactccgtccctgtttttgttaaggggt

SEQ ID NO: 111 - DNA, 58 bp, synthetic construct
  source 1..58: mol_type = other DNA
tcggccagaatatctaaacaattgtgctgaagcgcttcttctggaaggggaagcaaag

SEQ ID NO: 112 - DNA, 58 bp, synthetic construct
  source 1..58: mol_type = other DNA
tcggccagaatatctaaacaattgtgctgaaggttttcttctggaaggggaagcaaag

SEQ ID NO: 113 - DNA, 52 bp, synthetic construct
  source 1..52: mol_type = other DNA
gtctccttacgcgcatcagtaatacgacgttgaccttctttcagcaaatacc

SEQ ID NO: 114 - DNA, 44 bp, synthetic construct
  source 1..44: mol_type = other DNA
tccgccatacggtttccacgtacctccgctgagtgacccttttg

SEQ ID NO: 115 - DNA, 48 bp, synthetic construct
  source 1..48: mol_type = other DNA
ggcgtaggctgccccattacatcctccttacgcgcatcagtaatccaa

SEQ ID NO: 116 - DNA, 51 bp, synthetic construct; identical to SEQ ID NO: 100
  source 1..51: mol_type = other DNA

SEQ ID NO: 117 - DNA, 2115 bp, synthetic construct
  source 1..2115: mol_type = other DNA; note = cDNA obtained from a Moloney murine leukemia virus sequence
atgggcagcagccatcatcatcatcatcacagcagcggcctggtgccgcgcggcagccatatgactttaaatattgaggatgagcatcgtttacatgagacatcaaaagaacccgacgtgagcttagggtcaacgtggctttctgacttcccccaggcgtgggcggagactggcggaatggggttagctgtccgccaagcaccgttgatcatcccgttaaaggcaacgtctacacctgtctctatcaaacagtaccccatgagtcaagaggcccgcctggggattaagccacatattcagcgcttgctggaccaggggatcttggtcccatgtcaatctccgtggaacaccccccttctgcccgtgaaaaagccaggtacaaacgattatcgtccagttcaagatcttcgcgaggtcaacaaacgcgtagaagacatccatccgactgtacctaatccttataatctgttatcaggcctgcccccatcgcaccaatggtatacagtattagacttgaaagacgcgttcttttgcctgcgtctgcacccaacgtctcagccgctgtttgcgttcgaatggcgtgatcctgaaatgggaatttcgggtcagttaacctggactcgtctgccccagggctttaaaaacagccccacattgttcgatgaagcacttcaccgtgacttagcagacttccgtatccaacacccagacttaattctgttacagtatgttgacgaccttttgttggcggcaacgtctgaacttgactgtcagcaaggcacacgcgcgttattacaaacgttaggtaacttaggatatcgtgcgtccgcgaaaaaggcgcaaatttgtcaaaaacaggtaaagtaccttgggtatttgctgaaagaaggtcaacgttggctgactgaagcgcgtaaggagaccgtaatggggcagcctacgcctaagacgccacgccagttgcgtgaatttttgggcacagcgggattctgtcgtttatggattcctgggttcgctgaaatggctgcacccctgtaccccttaacaaaaacagggacgcttttcaactgggggccagaccagcaaaaggcgtatcaggagatcaaacaagctttgttgaccgcacccgcgttgggtcttccggatttaaccaagccctttgagctgttcgttgatgaaaaacagggatatgcaaaaggagtattaacccaaaagttaggcccgtggcgtcgccctgttgcttacttgagtaaaaaattggatcctgtcgcagcaggatggccaccgtgcttgcgtatggtcgcggcaattgccgttttgacaaaggatgcaggtaagttgacgatgggtcaacccttagtaatcaaagctccacatgctgtagaagcgttagtaaagcagcccccagaccgctggctttctaatgcgcgcatgacccactatcaggcgcttctgcttgatacggatcgtgtacaatttggaccagttgtagctttgaatccagctactttgcttccccttccagaagaaggacttcagcacaattgtttagatattctggccgaggcacatgggacgcgccctgatttgacggatcagccactgcctgatgccgaccatacatggtatactgatggcagtagtcttcttcaagaggggcaacgcaaggcgggagcagccgtcactacggagaccgaagttatctgggccaaagcgttacccgcgggaacatccgcgcaacgtgcagaattaatcgctctgacacaggccctgaagatggcagagggcaaaaagttgaatgtctacaccgattcacgttatgcttttgcaacagcgcatatccatggcgaaatttaccgccgccgtggtctgctgactagtgagggtaaggaaattaaaaataaagatgagattcttgcgttgttaaaagctttattcttaccaaaacgcctttcgatcattcattgcccggggcatcaaaagggtcactcagcggaggctcgtggaaaccgtatggcggaccaagctgcccgtaaggcggcgatcacagagaccccggatacatcaacgctgttgatcgaaaacagctctccctacactagcgagcatttttaa

SEQ ID NO: 118 - DNA, 2115 bp, synthetic construct
  source 1..2115: mol_type = other DNA
atgggcagcagccatcatcatcatcatcacagcagcggcctggtgccgcgcggcagccatatgactttaaatattgaggatgagcatcgtttacatgagacatcaaaagaacccgacgtgagcttagggtcaacgtggctttctgacttcccccaggcgtgggcggagactggcggaatggggttagctgtccgccaagcaccgttgatcatcccgttaaaggcaacgtctacacctgtctctatcaaacagtaccccatgagtcaagaggcccgcctggggattaagccacatattcagcgcttgctggaccaggggatcttggtcccatgtcaatctccgtggaacaccccccttctgcccgtgaaaaagccaggtacaaacgattatcgtccagttcaagatcttcgcgaggtcaacaaacgcgtagaagacatccatccgactgtacctaatccttataatctgttatcaggcctgcccccatcgcaccaatggtatacagtattagacttgaaagacgcgttcttttgcctgcgtctgcacccaacgtctcagccgctgtttgcgttcgaatggcgtgatcctgaaatgggaatttcgggtcagttaacctggactcgtctgccccagggctttaaaaacagccccacattgttcgatgaagcacttcaccgtgacttagcagacttccgtatccaacacccagacttaattctgttacagtatgttgacgaccttttgttggcggcaacgtctgaacttgactgtcagcaaggcacacgcgcgttattacaaacgttaggtaacttaggatatcgtgcgtccgcgaaaaaggcgcaaatttgtcaaaaacaggtaaagtaccttgggtatttgctgaaagaaggtcaacgttggctgactgaagcgcgtaaggagaccgtaatggggcagcctacgcctaagacgccacgccagttgcgtgaatttttgggcacagcgggattctgtcgtttatggattcctgggttcgctgaaatggctgcacccctgtaccccttaacaaaaacagggacgcttttcaactgggggccagaccagcaaaaggcgtatcaggagatcaaacaagctttgttgaccgcacccgcgttgggtcttccggatttaaccaagccctttgagctgttcgttgatgaaaaacagggatatgcaaaaggagtattaacccaaaagttaggcccgtggcgtcgccctgttgcttacttgagtaaaaaattggatcctgtcgcagcaggatggccaccgtgcttgcgtatggtcgcggcaattgccgttttgacaaaggatgcaggtaagttgacgatgggtcaacccttagtaatcttggctccacatgctgtagaagcgttagtaaagcagcccccagaccgctggctttctaatgcgcgcatgacccactatcaggcgcttctgcttgatacggatcgtgtacaatttggaccagttgtagctttgaatccagctactttgcttccccttccagaagaaggacttcagcacaattgtttagatattctggccgaggcacatgggacgcgccctgatttgacggatcagccactgcctgatgccgaccatacatggtatactggcggcagtagtcttcttcaagaggggcaacgcaaggcgggagcagccgtcactacggagaccgaagttatctgggccaaagcgttacccgcgggaacatccgcgcaacgtgcacagttaatcgctctgacacaggccctgaagatggcagagggcaaaaagttgaatgtctacaccaactcacgttatgcttttgcaacagcgcatatccatggcgaaatttaccgccgccgtggtctgctgactagtgagggtaaggaaattaaaaataaagatgagattcttgcgttgttaaaagctttattcttaccaaaacgcctttcgatcattcattgcccggggcatcaaaagggtcactcagcggaggctcgtggaaaccgtatggcggaccaagctgcccgtaaggcggcgatcacagagaccccggatacatcaacgctgttgatcgaaaacagctctccctacactagcgagcatttttaa

SEQ ID NO: 119 - DNA, 2115 bp, synthetic construct
  source 1..2115: mol_type = other DNA
atgggcagcagccatcatcatcatcatcacagcagcggcctggtgccgcgcggcagccatatgactttaaatattgaggatgagcatcgtttacatgagacatcaaaagaacccgacgtgagcttagggtcaacgtggctttctgacttcccccaggcgtgggcggagactggcggaatggggttagctgtccgccaagcaccgttgatcatcccgttaaaggcaacgtctacacctgtctctatcaaacagtaccccatgagtcgtgaggcccgcctggggattaagccacatattcgtcgcttgtatgaccaggggatcttggtcccatgtcaatctccgtggaacaccccccttcgtcccgtgaaaaagccaggtacaaacgattatcgtccagttcaagatcttcgcgaggtcaacaaacgcgtagaagacatccatccgactgtacctaatccttataatctgttatcaggcctgcccccatcgcaccaatggtatacagtattagacttgaaagacgcgttcttttgcctgcgtctgcacccaacgtctcagccgctgtttgcgttcgaatggcgtgatcctgaaatgggaatttcgggtcagttaacctggactcgtctgccccagggctttaaaaacagccccacattgttcgatgaagcacttcaccgtgacttagcagacttccgtatccaacacccagacttaattctgttacagtatgttgacgaccttttgttggcggcaacgtctgaacttgactgtcagcaaggcacacgcgcgttattacaaacgttaggtaacttaggatatcgtgcgtccgcgaaaaaggcgcaaatttgtcaaaaacaggtaaagtaccttgggtatttgctgaaagaaggtcaacgttggattactgatgcgcgtaaggagaccgtaatggggcagcctacgcctaagacgccacgcgaattgcgtgaatttttgggcaaagcgggattctgtcgtttatggattcctgggttcgctgaaatggctgcacccctgtaccccttaacaaaaacagggacgcttttcaactgggggccagaccagcaaaaggcgtatcaggagatcaaacaagctttgttgaccgcacccgcgttgggtcttccggatttaaccaagccctttgagctgttcgttgatgaaaaacagggatatgcaaaaggagtattaacccaaaagttaggcccgtggcgtcgccctgttgcttacttgagtaaaaaattggatcctgtcgcagcaggatggccaccgtgcttgcgtatggtcgcggcaattgccgttttgacaaaggatgcaggtaagttgacgatgggtcaacccttaaacatcttggctccacatgctgtagaagcgttagtaaagcagcccccagaccgctggctttctaatgcgcgcatgacccactatcaggcgcttctgcttgatacggatcgtgtacaatttggaccagttgtagctttgaatccagctactttgcttccccttccagaagaaggacttcagcacaattgtttagatattctggccgaggcacatgggacgcgccctgatttgacggatcagccactgcctgatgccgaccatacatggtatactggcggcagtagtcttcttcaagaggggcaacgcaaggcgggagcagccgtcactacggagaccgaagttatctgggccaaagcgttacccgcgggaacatccgcgcaacgtgcacagttaatcgctctgacacaggccctgaagatggcagagggcaaaaagttgaatgtctacaccaactcacgttatgcttttgcaacagcgcattggcatggcgaaatttaccgccgccgtggtctgctgactagtgagggtaaggaaattaaaaataaagatgagattcttgcgttgttaaaagctttattcttaccaaaacgcctttcgatcattcattgcccggggcatcaaaagggtcactcagcggaggctcgtggaaaccgtatggcggaccaagctgcccgtaaggcggcgatcacagagaccccggatacatcaacgctgttgatcgaaaacagctctccctacactagcgagcatttttaa

SEQ ID NO: 120 - DNA, 2115 bp, synthetic construct
  source 1..2115: mol_type = other DNA
atgggcagcagccatcatcatcatcatcacagcagcggcctggtgccgcgcggcagccatatgactttaaatattgaggatgagcatcgtttacatgagacatcaaaagaacccgacgtgagcttagggtcaacgtggctttctgacttcccccaggcgtgggcggagactggcggaatggggttagctgtccgccaagcaccgttgatcatcccgttaaaggcaacgtctacacctgtctctatcaaacagtaccccatgagtcgtgaggcccgcctggggattaagccacatattcgtcgcttgtatgaccaggggatcttggtcccatgtcaatctccgtggaacaccccccttcgtcccgtgaaaaagccaggtacaaacgattatcgtccagttcaagatcttcgcgaggtcaacaaacgcgtagaagacatccatccgactgtacctaatccttataatctgttatcaggcctgcccccatcgcaccaatggtatacagtattagacttgaaagacgcgttcttttgcctgcgtctgcacccaacgtctcagccgctgtttgcgttcgaatggcgtgatcctgaaatgggaatttcgggtcagttaacctggactcgtctgccccagggctttaaaaacagccccacattgttcgatgaagcacttcaccgtgacttagcagacttccgtatccaacacccagacttaattctgttacagtatgttgacgaccttttgttggcggcaacgtctgaacttgactgtcagcaaggcacacgcgcgttattacaaacgttaggtaacttaggatatcgtgcgtccgcgaaaaaggcgcaaatttgtcaaaaacaggtaaagtaccttgggtatttgctgaaagaaggtcaacgttggattactgatgcgcgtaaggaggatgtaatggggcagcctacgcctaagacgccacgcgaattgcgtgaatttttgggcaaagcgggattctgtcgtttatggattcctgggttcgctgaaatggctgcacccctgtaccccttaacaaaaacagggacggagttcaactgggggccagaccagcaaaaggcgtatcaggagatcaaacaagctttgttgaccgcacccgcgttgggtcttccggatttaaccaagccctttgagctgttcgttgatgaaaaacagggatatgcaaaaggagtattaacccaaaagttaggcccgtggcgtcgccctgttgcttacttgagtaaaaaattggatcctgtcgcagcaggatggccaccgtgcttgcgtatggtcgcggcaattgccgttttgacaaaggatgcaggtaagttgacgatgggtcaacccttaaacatccatgctccacatgctgtagaagcgttagtaaagcagcccccagaccgctggctttctaatgcgcgcatgacccactatcaggcgcttctgcttgatacggatcgtgtacaatttggaccagttgtagctttgaatccagctactttgcttccccttccagaagaaggacttcagcacaattgtttagatattctggccgaggcacatgggacgcgccctgatttgacggatcagccactgcctgatgccgaccatacatggtatactggcggcagtagtcttcttcaagaggggcaacgcaaggcgggagcagccgtcactacggagaccgaagttatctgggccaaagcgttacccgcgggaacatccgcgcaacgtgcacagttaatcgctctgacacaggccctgaagatggcagagggcaaaaagttgaatgtctacaccaactcacgttatgcttttgcaacagcgcattggcatggcgaaatttaccgccgccgtggtctgctgactagtgagggtaaggaaattaaaaataaagatgagattcttgcgttgttaaaagctttattcttaccaaaacgcctttcgatcattcattgcccggggcatcaaaagggtcactcagcggaggctcgtggaaaccgtatggcggaccaagctgcccgtaaggcggcgatcacagagaccccggatacatcaacgctgttgatcgaaaacagctctccctacactagcgagcatttttaa

SEQ ID NO: 121 - DNA, 2115 bp, synthetic construct
  source 1..2115: mol_type = other DNA
atgggcagcagccatcatcatcatcatcacagcagcggcctggtgccgcgcggcagccatatgactttaaatattgaggatgagcatcgtttacatgagacatcaaaagaacccgacgtgagcttagggtcaacgtggctttctgacttcccccaggcgtgggcggagactggcggaatggggttagctgtccgccaagcaccgttgatcatcccgttaaaggcaacgtctacacctgtctctatcaaacagtaccccatgagtcgtgaggcccgcctggggattaagccacatattcgtcgcttgtatgaccaggggatcttggtcccatgtcaatctccgtggaacaccccccttcgtcccgtgaaaaagccaggtacaaacgattatcgtccagttcaagatcttcgcgaggtcaacaaacgcgtagaagacatccatccgactgtacctaatccttataatctgttatcaggcctgcccccatcgcaccaatggtatacagtattagacttgaaagacgcgttcttttgcctgcgtctgcacccaacgtctcagccgctgtttgcgttcgaatggcgtgatcctgaaatgggaatttcgggtcagttaacctggactcgtctgccccagggctttaaaaacagccccacattgttcgatgaagcacttcaccgtgacttagcagacttccgtatccaacacccagacttaattctgttacagtatgttgacgaccttttgttggcggcaacgtctgaacttgactgtcagcaaggcacacgcgcgttattacaaacgttaggtaacttaggatatcgtgcgtccgcgaaaaaggcgcaaatttgtcaaaaacaggtaaagtaccttgggtatttgctgaaagaaggtcaacgttggattactgatgcgcgtaaggaggatgtaatggggcagcctacgcctaagacgccacgcgaattgcgtgaatttttgggcaaagcgggattctgtcgtttatggattcctgggttcgctgaaatggctgcacccctgtaccccttaacaaaaacagggacggagttcaactgggggccagaccagcaaaaggcgtatcaggagatcaaacaagctttgttgaccgcacccgcgttgggtcttccggatttaaccaagccctttgagctgttcgttgatgaaaaacagggatatgcaaaaggagtattaacccaaaagttaggcccgtggcgtcgccctgttgcttacttgagtaaaaaattggatcctgtcgcagcaggatggccaccgtgcttgcgtatggtcgcggcaattgccgttttgacaaaggatgcaggtaagttgacgatgggtcaacccttaaacatcttggctccacatgctgtagaagcgttagtaaagcagcccccagaccgctggctttctaatgcgcgcatgacccactatcaggcgcttctgcttgatacggatcgtgtacaatttggaccagttgtagctttgaatccagctactttgcttccccttccagaagaagcgcttcagcacaattgtttagatattctggccgaggcacatgggacgcgccctgatttgacggatcagccactgcctgatgccgaccatacatggtatactggcggcagtagtcttcttcaagaggggcaacgcaaggcgggagcagccgtcactacggagaccgaagttatctgggccaaagcgttacccgcgggaacatccgcgcaacgtgcacagttaatcgctctgacacaggccctgaagatggcagagggcaaaaagttgaatgtctacaccaactcacgttatgcttttgcaacagcgcattggcatggcgaaatttaccgccgccgtggtctgctgactagtgagggtaaggaaattaaaaataaagatgagattcttgcgttgttaaaagctttattcttaccaaaacgcctttcgatcattcattgcccggggcatcaaaagggtcactcagcggaggctcgtggaaaccgtatggcggaccaagctgcccgtaaggcggcgatcacagagaccccggatacatcaacgctgttgatcgaaaacagctctccctacactagcgagcatttttaa

SEQ ID NO: 122 - DNA, 2115 bp, synthetic construct
  source 1..2115: mol_type = other DNA
atgggcagcagccatcatcatcatcatcacagcagcggcctggtgccgcgcggcagccatatgactttaaatattgaggatgagcatcgtttacatgagacatcaaaagaacccgacgtgagcttagggtcaacgtggctttctgacttcccccaggcgtgggcggagactggcggaatggggttagctgtccgccaagcaccgttgatcatcccgttaaaggcaacgtctacacctgtctctatcaaacagtaccccatgagtcgtgaggcccgcctggggattaagccacatattcgtcgcttgtatgaccaggggatcttggtcccatgtcaatctccgtggaacaccccccttcgtcccgtgaaaaagccaggtacaaacgattatcgtccagttcaagatcttcgcgaggtcaacaaacgcgtagaagacatccatccgactgtacctaatccttataatctgttatcaggcctgcccccatcgcaccaatggtatacagtattagacttgaaagacgcgttcttttgcctgcgtctgcacccaacgtctcagccgctgtttgcgttcgaatggcgtgatcctgaaatgggaatttcgggtcagttaacctggactcgtctgccccagggctttaaaaacagccccacattgttcgatgaagcacttcaccgtgacttagcagacttccgtatccaacacccagacttaattctgttacagtatgttgacgaccttttgttggcggcaacgtctgaacttgactgtcagcaaggcacacgcgcgttattacaaacgttaggtaacttaggatatcgtgcgtccgcgaaaaaggcgcaaatttgtcaaaaacaggtaaagtaccttgggtatttgctgaaagaaggtcaacgttggattactgatgcgcgtaaggaggatgtaatggggcagcctacgcctaagacgccacgcgaattgcgtgaatttttgggcaaagcgggattctgtcgtttatggattcctgggttcgctgaaatggctgcacccctgtaccccttaacaaaaacagggacggagttcaactgggggccagaccagcaaaaggcgtatcaggagatcaaacaagctttgttgaccgcacccgcgttgggtcttccggatttaaccaagccctttgagctgttcgttgatgaaaaacagggatatgcaaaaggagtattaacccaaaagttaggcccgtggcgtcgccctgttgcttacttgagtaaaaaattggatcctgtcgcagcaggatggccaccgtgcttgcgtatggtcgcggcaattgccgttttgacaaaggatgcaggtaagttgacgatgggtcaacccttaaacatcttggctccacatgctgtagaagcgttagtaaagcagcccccagaccgctggctttctaatgcgcgcatgacccactatcaggcgcttctgcttgatacggatcgtgtacaatttggaccagttgtagctttgaatccagctactttgcttccccttccagaagaaggacttcagcacaattgtttagatattctggccgaggcacatgggacgcgccctgatttgacggatcagccactgcctgatgccgaccatacatggtatactggcggcagtagtcttcttcaagaggggcaacgcaaggcgggagcagccgtcactacggagaccgaagttatctgggccaaagcgttacccgcgggaacatccgcgcaacgtgcacagttaatcgctctgacacaggccctgaagatggcagagggcaaaaagttgaatgtctacaccaactcacgttatgcttttgcaacagcgcattggcatggcgaaatttaccgccgccgtggtctgctgactagtgagggtaaggaaattaaaaataaagatgagattcttgcgttgttaaaagctttattcttaccaaaaatgctttcgatcattcattgcccggggcatcaaaagggtcactcagcggaggctcgtggaaaccgtatggcggaccaagctgcccgtaaggcggcgatcacagagaccccggatacatcaacgctgttgatcgaaaacagctctccctacactagcgagcatttttaa

SEQ ID NO: 123 - DNA, 2115 bp, synthetic construct
  source 1..2115: mol_type = other DNA
atgggcagcagccatcatcatcatcatcacagcagcggcctggtgccgcgcggcagccatatgactttaaatattgaggatgagcatcgtttacatgagacatcaaaagaacccgacgtgagcttagggtcaacgtggctttctgacttcccccaggcgtgggcggagactggcggaatggggttagctgtccgccaagcaccgttgatcatcccgttaaaggcaacgtctacacctgtctctatcaaacagtaccccatgagtcgtgaggcccgcctggggattaagccacatattcgtcgcttgtatgaccaggggatcttggtcccatgtcaatctccgtggaacaccccccttcgtcccgtgaaaaagccaggtacaaacgattatcgtccagttcaagatcttcgcgaggtcaacaaacgcgtagaagacatccatccgactgtacctaatccttataatctgttatcaggcctgcccccatcgcaccaatggtatacagtattagacttgaaagacgcgttcttttgcctgcgtctgcacccaacgtctcagccgctgtttgcgttcgaatggcgtgatcctgaaatgggaatttcgggtcagttaacctggactcgtctgccccagggctttaaaaacagccccacattgttcgatgaagcacttcaccgtgacttagcagacttccgtatccaacacccagacttaattctgttacagtatgttgacgaccttttgttggcggcaacgtctgaacttgactgtcagcaaggcacacgcgcgttattacaaacgttaggtaacttaggatatcgtgcgtccgcgaaaaaggcgcaaatttgtcaaaaacaggtaaagtaccttgggtatttgctgaaagaaggtcaacgttggattactgatgcgcgtaaggaggatgtaatggggcagcctacgcctaagacgccacgcgaattgcgtgaatttttgggcaaagcgggattctgtcgtttatggattcctgggttcgctgaaatggctgcacccctgtaccccttaacaaaaacagggacggagttcaactgggggccagaccagcaaaaggcgtatcaggagatcaaacaagctttgttgaccgcacccgcgttgggtcttccggatttaaccaagccctttgagctgttcgttgatgaaaaacagggatatgcaaaaggagtattaacccaaaagttaggcccgtggcgtcgccctgttgcttacttgagtaaaaaattggatcctgtcgcagcaggatggccaccgtgcttgcgtatggtcgcggcaattgccgttttgacaaaggatgcaggtaagttgacgatgggtcaacccttaaacatcttggctccacatgctgtagaagcgttagtaaagcagcccccagaccgctggctttctaatgcgcgcatgacccactatcaggcgcttctgcttgatacggatcgtgtacaatttggaccagttgtagctttgaatccagctactttgcttccccttccagaagaaggacttcagcacaattgtttagatattctggccgaggcacatgggacgcgccctgatttgacggatcagccactgcctgatgccgaccatacatggtatactggcggcagtagtcttcttcaagaggggcaacgcaaggcgggagcagccgtcactacggagaccgaagttatctgggccaaagcgttacccgcgggaacatccgcgcaacgtgcacagttaatcgctctgacacaggccctgaagatggcagagggcaaaaagttgaatgtctacaccaactcacgttatgcttttgcaacagcgcattggcatggcgaaatttaccgccgccgtggtctgctgactagtgagggtaaggaaattaaaaataaagatgagattcttgcgttgttaaaagctttattcttaccaaaacgcctttcgatcattcattgcccggggcatcaaaagggtcactcagcggaggtacgtggaaaccgtatggcggaccaagctgcccgtaaggcggcgatcacagagaccccggatacatcaacgctgttgatcgaaaacagctctccctacactagcgagcatttttaa

SEQ ID NO: 124 - DNA, 2115 bp, synthetic construct
  source 1..2115: mol_type = other DNA
atgggcagcagccatcatcatcatcatcacagcagcggcctggtgccgcgcggcagccatatgactttaaatattgaggatgagcatcgtttacatgagacatcaaaagaacccgacgtgagcttagggtcaacgtggctttctgacttcccccaggcgtgggcggagactggcggaatggggttagctgtccgccaagcaccgttgatcatcccgttaaaggcaacgtctacacctgtctctatcaaacagtaccccatgagtcgtgaggcccgcctggggattaagccacatattcgtcgcttgtatgaccaggggatcttggtcccatgtcaatctccgtggaacaccccccttcgtcccgtgaaaaagccaggtacaaacgattatcgtccagttcaagatcttcgcgaggtcaacaaacgcgtagaagacatccatccgactgtacctaatccttataatctgttatcaggcctgcccccatcgcaccaatggtatacagtattagacttgaaagacgcgttcttttgcctgcccctgcacccaacgtctcagccgctgtttgcgttcgaatggcgtgatcctgaaatgggaatttcgggtcagttaacctggactcgtctgccccagggctttaaaaacagccccacattgttcgatgaagcacttcaccgtgacttagcagacttccgtatccaacacccagacttaattctgttacagtatgttgacgaccttttgttggcggcaacgtctgaacttgactgtcagcaaggcacacgcgcgttattacaaacgttaggtaacttaggatatcgtgcgtccgcgaaaaaggcgcaaatttgtcaaaaacaggtaaagtaccttgggtatttgctgaaagaaggtcaacgttggattactgatgcgcgtaaggaggatgtaatggggcagcctacgcctaagacgccacgcgaattgcgtgaatttttgggcaaagcgggattctgtcgtttatggattcctgggttcgctgaaatggctgcacccctgtaccccttaacaaaaacagggacggagttcaactgggggccagaccagcaaaaggcgtatcaggagatcaaacaagctttgttgaccgcacccgcgttgggtcttccggatttaaccaagccctttgagctgttcgttgatgaaaaacagggatatgcaaaaggagtattaacccaaaagttaggcccgtggcgtcgccctgttgcttacttgagtaaaaaattggatcctgtcgcagcaggatggccaccgtgcttgcgtatggtcgcggcaattgccgttttgacaaaggatgcaggtaagttgacgatgggtcaacccttaaacatcttggctccacatgctgtagaagcgttagtaaagcagcccccagaccgctggctttctaatgcgcgcatgacccactatcaggcgcttctgcttgatacggatcgtgtacaatttggaccagttgtagctttgaatccagctactttgcttccccttccagaagaaggacttcagcacaattgtttagatattctggccgaggcacatgggacgcgccctgatttgacggatcagccactgcctgatgccgaccatacatggtatactggcggcagtagtcttcttcaagaggggcaacgcaaggcgggagcagccgtcactacggagaccgaagttatctgggccaaagcgttacccgcgggaacatccgcgcaacgtgcacagttaatcgctctgacacaggccctgaagatggcagagggcaaaaagttgaatgtctacaccaactcacgttatgcttttgcaacagcgcattggcatggcgaaatttaccgccgccgtggtctgctgactagtgagggtaaggaaattaaaaataaagatgagattcttgcgttgttaaaagctttattcttaccaaaacgcctttcgatcattcattgcccggggcatcaaaagggtcactcagcggaggctcgtggaaaccgtatggcggaccaagctgcccgtaaggcggcgatcacagagaccccggatacatcaacgctgttgatcgaaaacagctctccctacactagcgagcatttttaa

SEQ ID NO: 125 - DNA, 2115 bp, synthetic construct
  source 1..2115: mol_type = other DNA
atgggcagcagccatcatcatcatcatcacagcagcggcctggtgccgcgcggcagccatatgactttaaatattgaggatgagcatcgtttacatgagacatcaaaagaacccgacgtgagcttagggtcaacgtggctttctgacttcccccaggcgtgggcggagactggcggaatggggttagctgtccgccaagcaccgttgatcatcccgttaaaggcaacgtctacacctgtctctatcaaacagtaccccatgagtcgtgaggcccgcctggggattaagccacatattcgtcgcttgtatgaccaggggatcttggtcccatgtcaatctccgtggaacaccccccttcgtcccgtgaaaaagccaggtacaaacgattatcgtccagttcaagatcttcgcgaggtcaacaaacgcgtagaagacatccatccgactgtacctaatccttataatctgttatcaggcctgcccccatcgcaccaatggtatacagtattagacttgaaagacgcgttcttttgcctgcgtctgcacccaacgtctcagccgctgtttgcgttcgaatggcgtgatcctgaaatgggaatttcgggtcagttaacctggactcgtctgccccagggctttaaaaacagccccacattgttcgatgaagcacttcaccgtgacttagcagacttccgtatccaacacccagacttaattctgttacagtatgttgacgaccttttgttggcggcaacgtctgaacttgactgtcagcaaggcacacgcgcgttattacaaacgttaggtaacttaggatatcgtgcgtccgcgaaaaaggcgcaaatttgtcaaaaacaggtaaagtaccttgggtatttgctgaaagaaggtcaacgttggattactgatgcgcgtaaggaggatgtaatggggcagcctacgcctaagacgccacgcgaattgcgtgaatttttgggcaaagcgggattctgtcgtttatggattcctgggttcgctgaaatggctgcacccctgtaccccttaacaaaaacagggacggagttcaactgggggccagaccagcaaaaggcgtatcaggagatcaaacaagctttgttgaccgcacccgcgttgggtcttccggatttaaccaagccctttgagctgttcgttgatgaaaaacagggatatgcaaaaggagtattaacccaaaagttaggcccgtggcgtcgccctgttgcttacttgagtaaaaaattggatcctgtcgcagcaggatggccaccgtgcttgcgtatggtcgcggcaattgccgttttgacaaaggatgcaggtaagttgacgatgggtcaacccttaaacatccatgctccacatgctgtagaagcgttagtaaagcagcccccagaccgctggctttctaatgcgcgcatgacccactatcaggcgcttctgcttgatacggatcgtgtacaatttggaccagttgtagctttgaatccagctactttgcttccccttccagaagaagcgcttcagcacaattgtttagatattctggccgaggcacatgggacgcgccctgatttgacggatcagccactgcctgatgccgaccatacatggtatactggcggcagtagtcttcttcaagaggggcaacgcaaggcgggagcagccgtcactacggagaccgaagttatctgggccaaagcgttacccgcgggaacatccgcgcaacgtgcacagttaatcgctctgacacaggccctgaagatggcagagggcaaaaagttgaatgtctacaccaactcacgttatgcttttgcaacagcgcattggcatggcgaaatttaccgccgccgtggtctgctgactagtgagggtaaggaaattaaaaataaagatgagattcttgcgttgttaaaagctttattcttaccaaaacgcctttcgatcattcattgcccggggcatcaaaagggtcactcagcggaggctcgtggaaaccgtatggcggaccaagctgcccgtaaggcggcgatcacagagaccccggatacatcaacgctgttgatcgaaaacagctctccctacactagcgagcatttttaa

SEQ ID NO: 126 - DNA, 2115 bp, synthetic construct
  source 1..2115: mol_type = other DNA
atgggcagcagccatcatcatcatcatcacagcagcggcctggtgccgcgcggcagccatatgactttaaatattgaggatgagcatcgtttacatgagacatcaaaagaacccgacgtgagcttagggtcaacgtggctttctgacttcccccaggcgtgggcggagactggcggaatggggttagctgtccgccaagcaccgttgatcatcccgttaaaggcaacgtctacacctgtctctatcaaacagtaccccatgagtcgtgaggcccgcctggggattaagccacatattcgtcgcttgtatgaccaggggatcttggtcccatgtcaatctccgtggaacaccccccttcgtcccgtgaaaaagccaggtacaaacgattatcgtccagttcaagatcttcgcgaggtcaacaaacgcgtagaagacatccatccgactgtacctaatccttataatctgttatcaggcctgcccccatcgcaccaatggtatacagtattagacttgaaagacgcgttcttttgcctgcgtctgcacccaacgtctcagccgctgtttgcgttcgaatggcgtgatcctgaaatgggaatttcgggtcagttaacctggactcgtctgccccagggctttaaaaacagccccacattgttcgatgaagcacttcaccgtgacttagcagacttccgtatccaacacccagacttaattctgttacagtatgttgacgaccttttgttggcggcaacgtctgaacttgactgtcagcaaggcacacgcgcgttattacaaacgttaggtaacttaggatatcgtgcgtccgcgaaaaaggcgcaaatttgtcaaaaacaggtaaagtaccttgggtatttgctgaaagaaggtcaacgttggattactgatgcgcgtaaggaggatgtaatggggcagcctacgcctaagacgccacgcgaattgcgtgaatttttgggcaaagcgggattctgtcgtttatggattcctgggttcgctgaaatggctgcacccctgtaccccttaacaaaaacagggacggagttcaactgggggccagaccagcaaaaggcgtatcaggagatcaaacaagctttgttgaccgcacccgcgttgggtcttccggatttaaccaagccctttgagctgttcgttgatgaaaaacagggatatgcaaaaggagtattaacccaaaagttaggcccgtggcgtcgccctgttgcttacttgagtaaaaaattggatcctgtcgcagcaggatggccaccgtgcttgcgtatggtcgcggcaattgccgttttgacaaaggatgcaggtaagttgacgatgggtcaacccttaaacatccatgctccacatgctgtagaagcgttagtaaagcagcccccagaccgctggctttctaatgcgcgcatgacccactatcaggcgcttctgcttgatacggatcgtgtacaatttggaccagttgtagctttgaatccagctactttgcttccccttccagaagaaggacttcagcacaattgtttagatattctggccgaggcacatgggacgcgccctgatttgacggatcagccactgcctgatgccgaccatacatggtatactggcggcagtagtcttcttcaagaggggcaacgcaaggcgggagcagccgtcactacggagaccgaagttatctgggccaaagcgttacccgcgggaacatccgcgcaacgtgcacagttaatcgctctgacacaggccctgaagatggcagagggcaaaaagttgaatgtctacaccaactcacgttatgcttttgcaacagcgcattggcatggcgaaatttaccgccgccgtggtctgctgactagtgagggtaaggaaattaaaaataaagatgagattcttgcgttgttaaaagctttattcttaccaaaaatgctttcgatcattcattgcccggggcatcaaaagggtcactcagcggaggctcgtggaaaccgtatggcggaccaagctgcccgtaaggcggcgatcacagagaccccggatacatcaacgctgttgatcgaaaacagctctccctacactagcgagcatttttaa

SEQ ID NO: 127 - DNA, 2115 bp, synthetic construct
  source 1..2115: mol_type = other DNA
atgggcagcagccatcatcatcatcatcacagcagcggcctggtgccgcgcggcagccatatgactttaaatattgaggatgagcatcgtttacatgagacatcaaaagaacccgacgtgagcttagggtcaacgtggctttctgacttcccccaggcgtgggcggagactggcggaatggggttagctgtccgccaagcaccgttgatcatcccgttaaaggcaacgtctacacctgtctctatcaaacagtaccccatgagtcgtgaggcccgcctggggattaagccacatattcgtcgcttgtatgaccaggggatcttggtcccatgtcaatctccgtggaacaccccccttcgtcccgtgaaaaagccaggtacaaacgattatcgtccagttcaagatcttcgcgaggtcaacaaacgcgtagaagacatccatccgactgtacctaatccttataatctgttatcaggcctgcccccatcgcaccaatggtatacagtattagacttgaaagacgcgttcttttgcctgcgtctgcacccaacgtctcagccgctgtttgcgttcgaatggcgtgatcctgaaatgggaatttcgggtcagttaacctggactcgtctgccccagggctttaaaaacagccccacattgttcgatgaagcacttcaccgtgacttagcagacttccgtatccaacacccagacttaattctgttacagtatgttgacgaccttttgttggcggcaacgtctgaacttgactgtcagcaaggcacacgcgcgttattacaaacgttaggtaacttaggatatcgtgcgtccgcgaaaaaggcgcaaatttgtcaaaaacaggtaaagtaccttgggtatttgctgaaagaaggtcaacgttggattactgatgcgcgtaaggaggatgtaatggggcagcctacgcctaagacgccacgcgaattgcgtgaatttttgggcaaagcgggattctgtcgtttatggattcctgggttcgctgaaatggctgcacccctgtaccccttaacaaaaacagggacggagttcaactgggggccagaccagcaaaaggcgtatcaggagatcaaacaagctttgttgaccgcacccgcgttgggtcttccggatttaaccaagccctttgagctgttcgttgatgaaaaacagggatatgcaaaaggagtattaacccaaaagttaggcccgtggcgtcgccctgttgcttacttgagtaaaaaattggatcctgtcgcagcaggatggccaccgtgcttgcgtatggtcgcggcaattgccgttttgacaaaggatgcaggtaagttgacgatgggtcaacccttaaacatccatgctccacatgctgtagaagcgttagtaaagcagcccccagaccgctggctttctaatgcgcgcatgacccactatcaggcgcttctgcttgatacggatcgtgtacaatttggaccagttgtagctttgaatccagctactttgcttccccttccagaagaaggacttcagcacaattgtttagatattctggccgaggcacatgggacgcgccctgatttgacggatcagccactgcctgatgccgaccatacatggtatactggcggcagtagtcttcttcaagaggggcaacgcaaggcgggagcagccgtcactacggagaccgaagttatctgggccaaagcgttacccgcgggaacatccgcgcaacgtgcacagttaatcgctctgacacaggccctgaagatggcagagggcaaaaagttgaatgtctacaccaactcacgttatgcttttgcaacagcgcattggcatggcgaaatttaccgccgccgtggtctgctgactagtgagggtaaggaaattaaaaataaagatgagattcttgcgttgttaaaagctttattcttaccaaaacgcctttcgatcattcattgcccggggcatcaaaagggtcactcagcggaggtacgtggaaaccgtatggcggaccaagctgcccgtaaggcggcgatcacagagaccccggatacatcaacgctgttgatcgaaaacagctctccctacactagcgagcatttttaa

SEQ ID NO: 128 - DNA, 2115 bp, synthetic construct
  source 1..2115: mol_type = other DNA
atgggcagcagccatcatcatcatcatcacagcagcggcctggtgccgcgcggcagccatatgactttaaatattgaggatgagcatcgtttacatgagacatcaaaagaacccgacgtgagcttagggtcaacgtggctttctgacttcccccaggcgtgggcggagactggcggaatggggttagctgtccgccaagcaccgttgatcatcccgttaaaggcaacgtctacacctgtctctatcaaacagtaccccatgagtcgtgaggcccgcctggggattaagccacatattcgtcgcttgtatgaccaggggatcttggtcccatgtcaatctccgtggaacaccccccttcgtcccgtgaaaaagccaggtacaaacgattatcgtccagttcaagatcttcgcgaggtcaacaaacgcgtagaagacatccatccgactgtacctaatccttataatctgttatcaggcctgcccccatcgcaccaatggtatacagtattagacttgaaagacgcgttcttttgcctgcccctgcacccaacgtctcagccgctgtttgcgttcgaatggcgtgatcctgaaatgggaatttcgggtcagttaacctggactcgtctgccccagggctttaaaaacagccccacattgttcgatgaagcacttcaccgtgacttagcagacttccgtatccaacacccagacttaattctgttacagtatgttgacgaccttttgttggcggcaacgtctgaacttgactgtcagcaaggcacacgcgcgttattacaaacgttaggtaacttaggatatcgtgcgtccgcgaaaaaggcgcaaatttgtcaaaaacaggtaaagtaccttgggtatttgctgaaagaaggtcaacgttggattactgatgcgcgtaaggaggatgtaatggggcagcctacgcctaagacgccacgcgaattgcgtgaatttttgggcaaagcgggattctgtcgtttatggattcctgggttcgctgaaatggctgcacccctgtaccccttaacaaaaacagggacggagttcaactgggggccagaccagcaaaaggcgtatcaggagatcaaacaagctttgttgaccgcacccgcgttgggtcttccggatttaaccaagccctttgagctgttcgttgatgaaaaacagggatatgcaaaaggagtattaacccaaaagttaggcccgtggcgtcgccctgttgcttacttgagtaaaaaattggatcctgtcgcagcaggatggccaccgtgcttgcgtatggtcgcggcaattgccgttttgacaaaggatgcaggtaagttgacgatgggtcaacccttaaacatccatgctccacatgctgtagaagcgttagtaaagcagcccccagaccgctggctttctaatgcgcgcatgacccactatcaggcgcttctgcttgatacggatcgtgtacaatttggaccagttgtagctttgaatccagctactttgcttccccttccagaagaaggacttcagcacaattgtttagatattctggccgaggcacatgggacgcgccctgatttgacggatcagccactgcctgatgccgaccatacatggtatactggcggcagtagtcttcttcaagaggggcaacgcaaggcgggagcagccgtcactacggagaccgaagttatctgggccaaagcgttacccgcgggaacatccgcgcaacgtgcacagttaatcgctctgacacaggccctgaagatggcagagggcaaaaagttgaatgtctacaccaactcacgttatgcttttgcaacagcgcattggcatggcgaaatttaccgccgccgtggtctgctgactagtgagggtaaggaaattaaaaataaagatgagattcttgcgttgttaaaagctttattcttaccaaaacgcctttcgatcattcattgcccggggcatcaaaagggtcactcagcggaggctcgtggaaaccgtatggcggaccaagctgcccgtaaggcggcgatcacagagaccccggatacatcaacgctgttgatcgaaaacagctctccctacactagcgagcatttttaa

SEQ ID NO: 129 - DNA, 2115 bp, synthetic construct
  source 1..2115: mol_type = other DNA
atgggcagcagccatcatcatcatcatcacagcagcggcctggtgccgcgcggcagccatatgactttaaatattgaggatgagcatcgtttacatgagacatcaaaagaacccgacgtgagcttagggtcaacgtggctttctgacttcccccaggcgtgggcggagactggcggaatggggttagctgtccgccaagcaccgttgatcatcccgttaaaggcaacgtctacacctgtctctatcaaacagtaccccatgagtcgtgaggcccgcctggggattaagccacatattcgtcgcttgtatgaccaggggatcttggtcccatgtcaatctccgtggaacaccccccttcgtcccgtgaaaaagccaggtacaaacgattatcgtccagttcaagatcttcgcgaggtcaacaaacgcgtagaagacatccatccgactgtacctaatccttataatctgttatcaggcctgcccccatcgcaccaatggtatacagtattagacttgaaagacgcgttcttttgcctgcgtctgcacccaacgtctcagccgctgtttgcgttcgaatggcgtgatcctgaaatgggaatttcgggtcagttaacctggactcgtctgccccagggctttaaaaacagccccacattgttcgatgaagcacttcaccgtgacttagcagacttccgtatccaacacccagacttaattctgttacagtatgttgacgaccttttgttggcggcaacgtctgaacttgactgtcagcaaggcacacgcgcgttattacaaacgttaggtaacttaggatatcgtgcgtccgcgaaaaaggcgcaaatttgtcaaaaacaggtaaagtaccttgggtatttgctgaaagaaggtcaacgttggattactgatgcgcgtaaggaggatgtaatggggcagcctacgcctaagacgccacgcgaattgcgtgaatttttgggcaaagcgggattctgtcgtttatggattcctgggttcgctgaaatggctgcacccctgtaccccttaacaaaaacagggacggagttcaactgggggccagaccagcaaaaggcgtatcaggagatcaaacaagctttgttgaccgcacccgcgttgggtcttccggatttaaccaagccctttgagctgttcgttgatgaaaaacagggatatgcaaaaggagtattaacccaaaagttaggcccgtggcgtcgccctgttgcttacttgagtaaaaaattggatcctgtcgcagcaggatggccaccgtgcttgcgtatggtcgcggcaattgccgttttgacaaaggatgcaggtaagttgacgatgggtcaacccttaaacatcttggctccacatgctgtagaagcgttagtaaagcagcccccagaccgctggctttctaatgcgcgcatgacccactatcaggcgcttctgcttgatacggatcgtgtacaatttggaccagttgtagctttgaatccagctactttgcttccccttccagaagaagcgcttcagcacaattgtttagatattctggccgaggcacatgggacgcgccctgatttgacggatcagccactgcctgatgccgaccatacatggtatactggcggcagtagtcttcttcaagaggggcaacgcaaggcgggagcagccgtcactacggagaccgaagttatctgggccaaagcgttacccgcgggaacatccgcgcaacgtgcacagttaatcgctctgacacaggccctgaagatggcagagggcaaaaagttgaatgtctacaccaactcacgttatgcttttgcaacagcgcattggcatggcgaaatttaccgccgccgtggtctgctgactagtgagggtaaggaaattaaaaataaagatgagattcttgcgttgttaaaagctttattcttaccaaaaatgctttcgatcattcattgcccggggcatcaaaagggtcactcagcggaggctcgtggaaaccgtatggcggaccaagctgcccgtaaggcggcgatcacagagaccccggatacatcaacgctgttgatcgaaaacagctctccctacactagcgagcatttttaa

SEQ ID NO: 130 - DNA, 2115 bp, synthetic construct
  source 1..2115: mol_type = other DNA
atgggcagcagccatcatcatcatcatcacagcagcggcctggtgccgcgcggcagccatatgactttaaatattgaggatgagcatcgtttacatgagacatcaaaagaacccgacgtgagcttagggtcaacgtggctttctgacttcccccaggcgtgggcggagactggcggaatggggttagctgtccgccaagcaccgttgatcatcccgttaaaggcaacgtctacacctgtctctatcaaacagtaccccatgagtcgtgaggcccgcctggggattaagccacatattcgtcgcttgtatgaccaggggatcttggtcccatgtcaatctccgtggaacaccccccttcgtcccgtgaaaaagccaggtacaaacgattatcgtccagttcaagatcttcgcgaggtcaacaaacgcgtagaagacatccatccgactgtacctaatccttataatctgttatcaggcctgcccccatcgcaccaatggtatacagtattagacttgaaagacgcgttcttttgcctgcgtctgcacccaacgtctcagccgctgtttgcgttcgaatggcgtgatcctgaaatgggaatttcgggtcagttaacctggactcgtctgccccagggctttaaaaacagccccacattgttcgatgaagcacttcaccgtgacttagcagacttccgtatccaacacccagacttaattctgttacagtatgttgacgaccttttgttggcggcaacgtctgaacttgactgtcagcaaggcacacgcgcgttattacaaacgttaggtaacttaggatatcgtgcgtccgcgaaaaaggcgcaaatttgtcaaaaacaggtaaagtaccttgggtatttgctgaaagaaggtcaacgttggattactgatgcgcgtaaggaggatgtaatggggcagcctacgcctaagacgccacgcgaattgcgtgaatttttgggcaaagcgggattctgtcgtttatggattcctgggttcgctgaaatggctgcacccctgtaccccttaacaaaaacagggacggagttcaactgggggccagaccagcaaaaggcgtatcaggagatcaaacaagctttgttgaccgcacccgcgttgggtcttccggatttaaccaagccctttgagctgttcgttgatgaaaaacagggatatgcaaaaggagtattaacccaaaagttaggcccgtggcgtcgccctgttgcttacttgagtaaaaaattggatcctgtcgcagcaggatggccaccgtgcttgcgtatggtcgcggcaattgccgttttgacaaaggatgcaggtaagttgacgatgggtcaacccttaaacatcttggctccacatgctgtagaagcgttagtaaagcagcccccagaccgctggctttctaatgcgcgcatgacccactatcaggcgcttctgcttgatacggatcgtgtacaatttggaccagttgtagctttgaatccagctactttgcttccccttccagaagaagcgcttcagcacaattgtttagatattctggccgaggcacatgggacgcgccctgatttgacggatcagccactgcctgatgccgaccatacatggtatactggcggcagtagtcttcttcaagaggggcaacgcaaggcgggagcagccgtcactacggagaccgaagttatctgggccaaagcgttacccgcgggaacatccgcgcaacgtgcacagttaatcgctctgacacaggccctgaagatggcagagggcaaaaagttgaatgtctacaccaactcacgttatgcttttgcaacagcgcattggcatggcgaaatttaccgccgccgtggtctgctgactagtgagggtaaggaaattaaaaataaagatgagattcttgcgttgttaaaagctttattcttaccaaaacgcctttcgatcattcattgcccggggcatcaaaagggtcactcagcggaggtacgtggaaaccgtatggcggaccaagctgcccgtaaggcggcgatcacagagaccccggatacatcaacgctgttgatcgaaaacagctctccctacactagcgagcatttttaa

SEQ ID NO: 131 - DNA, 2115 bp, synthetic construct
  source 1..2115: mol_type = other DNA
atgggcagcagccatcatcatcatcatcacagcagcggcctggtgccgcgcggcagccatatgactttaaatattgaggatgagcatcgtttacatgagacatcaaaagaacccgacgtgagcttagggtcaacgtggctttctgacttcccccaggcgtgggcggagactggcggaatggggttagctgtccgccaagcaccgttgatcatcccgttaaaggcaacgtctacacctgtctctatcaaacagtaccccatgagtcgtgaggcccgcctggggattaagccacatattcgtcgcttgtatgaccaggggatcttggtcccatgtcaatctccgtggaacaccccccttcgtcccgtgaaaaagccaggtacaaacgattatcgtccagttcaagatcttcgcgaggtcaacaaacgcgtagaagacatccatccgactgtacctaatccttataatctgttatcaggcctgcccccatcgcaccaatggtatacagtattagacttgaaagacgcgttcttttgcctgcccctgcacccaacgtctcagccgctgtttgcgttcgaatggcgtgatcctgaaatgggaatttcgggtcagttaacctggactcgtctgccccagggctttaaaaacagccccacattgttcgatgaagcacttcaccgtgacttagcagacttccgtatccaacacccagacttaattctgttacagtatgttgacgaccttttgttggcggcaacgtctgaacttgactgtcagcaaggcacacgcgcgttattacaaacgttaggtaacttaggatatcgtgcgtccgcgaaaaaggcgcaaatttgtcaaaaacaggtaaagtaccttgggtatttgctgaaagaaggtcaacgttggattactgatgcgcgtaaggaggatgtaatggggcagcctacgcctaagacgccacgcgaattgcgtgaatttttgggcaaagcgggattctgtcgtttatggattcctgggttcgctgaaatggctgcacccctgtaccccttaacaaaaacagggacggagttcaactgggggccagaccagcaaaaggcgtatcaggagatcaaacaagctttgttgaccgcacccgcgttgggtcttccggatttaaccaagccctttgagctgttcgttgatgaaaaacagggatatgcaaaaggagtattaacccaaaagttaggcccgtggcgtcgccctgttgcttacttgagtaaaaaattggatcctgtcgcagcaggatggccaccgtgcttgcgtatggtcgcggcaattgccgttttgacaaaggatgcaggtaagttgacgatgggtcaacccttaaacatcttggctccacatgctgtagaagcgttagtaaagcagcccccagaccgctggctttctaatgcgcgcatgacccactatcaggcgcttctgcttgatacggatcgtgtacaatttggaccagttgtagctttgaatccagctactttgcttccccttccagaagaagcgcttcagcacaattgtttagatattctggccgaggcacatgggacgcgccctgatttgacggatcagccactgcctgatgccgaccatacatggtatactggcggcagtagtcttcttcaagaggggcaacgcaaggcgggagcagccgtcactacggagaccgaagttatctgggccaaagcgttacccgcgggaacatccgcgcaacgtgcacagttaatcgctctgacacaggccctgaagatggcagagggcaaaaagttgaatgtctacaccaactcacgttatgcttttgcaacagcgcattggcatggcgaaatttaccgccgccgtggtctgctgactagtgagggtaaggaaattaaaaataaagatgagattcttgcgttgttaaaagctttattcttaccaaaacgcctttcgatcattcattgcccggggcatcaaaagggtcactcagcggaggctcgtggaaaccgtatggcggaccaagctgcccgtaaggcggcgatcacagagaccccggatacatcaacgctgttgatcgaaaacagctctccctacactagcgagcatttttaa

SEQ ID NO: 132 - DNA, 2115 bp, synthetic construct
  source 1..2115: mol_type = other DNA
atgggcagcagccatcatcatcatcatcacagcagcggcctggtgccgcgcggcagccatatgactttaaatattgaggatgagcatcgtttacatgagacatcaaaagaacccgacgtgagcttagggtcaacgtggctttctgacttcccccaggcgtgggcggagactggcggaatggggttagctgtccgccaagcaccgttgatcatcccgttaaaggcaacgtctacacctgtctctatcaaacagtaccccatgagtcgtgaggcccgcctggggattaagccacatattcgtcgcttgtatgaccaggggatcttggtcccatgtcaatctccgtggaacaccccccttcgtcccgtgaaaaagccaggtacaaacgattatcgtccagttcaagatcttcgcgaggtcaacaaacgcgtagaagacatccatccgactgtacctaatccttataatctgttatcaggcctgcccccatcgcaccaatggtatacagtattagacttgaaagacgcgttcttttgcctgcccctgcacccaacgtctcagccgctgtttgcgttcgaatggcgtgatcctgaaatgggaatttcgggtcagttaacctggactcgtctgccccagggctttaaaaacagccccacattgttcgatgaagcacttcaccgtgacttagcagacttccgtatccaacacccagacttaattctgttacagtatgttgacgaccttttgttggcggcaacgtctgaacttgactgtcagcaaggcacacgcgcgttattacaaacgttaggtaacttaggatatcgtgcgtccgcgaaaaaggcgcaaatttgtcaaaaacaggtaaagtaccttgggtatttgctgaaagaaggtcaacgttggattactgatgcgcgtaaggaggatgtaatggggcagcctacgcctaagacgccacgcgaattgcgtgaatttttgggcaaagcgggattctgtcgtttatggattcctgggttcgctgaaatggctgcacccctgtaccccttaacaaaaacagggacggagttcaactgggggccagaccagcaaaaggcgtatcaggagatcaaacaagctttgttgaccgcacccgcgttgggtcttccggatttaaccaagccctttgagctgttcgttgatgaaaaacagggatatgcaaaaggagtattaacccaaaagttaggcccgtggcgtcgccctgttgcttacttgagtaaaaaattggatcctgtcgcagcaggatggccaccgtgcttgcgtatggtcgcggcaattgccgttttgacaaaggatgcaggtaagttgacgatgggtcaacccttaaacatcttggctccacatgctgtagaagcgttagtaaagcagcccccagaccgctggctttctaatgcgcgcatgacccactatcaggcgcttctgcttgatacggatcgtgtacaatttggaccagttgtagctttgaatccagctactttgcttccccttccagaagaaggacttcagcacaattgtttagatattctggccgaggcacatgggacgcgccctgatttgacggatcagccactgcctgatgccgaccatacatggtatactggcggcagtagtcttcttcaagaggggcaacgcaaggcgggagcagccgtcactacggagaccgaagttatctgggccaaagcgttacccgcgggaacatccgcgcaacgtgcacagttaatcgctctgacacaggccctgaagatggcagagggcaaaaagttgaatgtctacaccaactcacgttatgcttttgcaacagcgcattggcatggcgaaatttaccgccgccgtggtctgctgactagtgagggtaaggaaattaaaaataaagatgagattcttgcgttgttaaaagctttattcttaccaaaaatgctttcgatcattcattgcccggggcatcaaaagggtcactcagcggaggctcgtggaaaccgtatggcggaccaagctgcccgtaaggcggcgatcacagagaccccggatacatcaacgctgttgatcgaaaacagctctccctacactagcgagcatttttaa

SEQ ID NO: 133 - DNA, 2115 bp, synthetic construct; identical to SEQ ID NO: 132
  source 1..2115: mol_type = other DNA

SEQ ID NO: 134 - DNA, 2115 bp, synthetic construct
  source 1..2115: mol_type = other DNA
atgggcagcagccatcatcatcatcatcacagcagcggcctggtgccgcgcggcagccatatgactttaaatattgaggatgagcatcgtttacatgagacatcaaaagaacccgacgtgagcttagggtcaacgtggctttctgacttcccccaggcgtgggcggagactggcggaatggggttagctgtccgccaagcaccgttgatcatcccgttaaaggcaacgtctacacctgtctctatcaaacagtaccccatgagtcgtgaggcccgcctggggattaagccacatattcgtcgcttgtatgaccaggggatcttggtcccatgtcaatctccgtggaacaccccccttcgtcccgtgaaaaagccaggtacaaacgattatcgtccagttcaagatcttcgcgaggtcaacaaacgcgtagaagacatccatccgactgtacctaatccttataatctgttatcaggcctgcccccatcgcaccaatggtatacagtattagacttgaaagacgcgttcttttgcctgcccctgcacccaacgtctcagccgctgtttgcgttcgaatggcgtgatcctgaaatgggaatttcgggtcagttaacctggactcgtctgccccagggctttaaaaacagccccacattgttcgatgaagcacttcaccgtgacttagcagacttccgtatccaacacccagacttaattctgttacagtatgttgacgaccttttgttggcggcaacgtctgaacttgactgtcagcaaggcacacgcgcgttattacaaacgttaggtaacttaggatatcgtgcgtccgcgaaaaaggcgcaaatttgtcaaaaacaggtaaagtaccttgggtatttgctgaaagaaggtcaacgttggattactgatgcgcgtaaggaggatgtaatggggcagcctacgcctaagacgccacgcgaattgcgtgaatttttgggcaaagcgggattctgtcgtttatggattcctgggttcgctgaaatggctgcacccctgtaccccttaacaaaaacagggacggagttcaactgggggccagaccagcaaaaggcgtatcaggagatcaaacaagctttgttgaccgcacccgcgttgggtcttccggatttaaccaagccctttgagctgttcgttgatgaaaaacagggatatgcaaaaggagtattaacccaaaagttaggcccgtggcgtcgccctgttgcttacttgagtaaaaaattggatcctgtcgcagcaggatggccaccgtgcttgcgtatggtcgcggcaattgccgttttgacaaaggatgcaggtaagttgacgatgggtcaacccttaaacatcttggctccacatgctgtagaagcgttagtaaagcagcccccagaccgctggctttctaatgcgcgcatgacccactatcaggcgcttctgcttgatacggatcgtgtacaatttggaccagttgtagctttgaatccagctactttgcttccccttccagaagaaggacttcagcacaattgtttagatattctggccgaggcacatgggacgcgccctgatttgacggatcagccactgcctgatgccgaccatacatggtatactggcggcagtagtcttcttcaagaggggcaacgcaaggcgggagcagccgtcactacggagaccgaagttatctgggccaaagcgttacccgcgggaacatccgcgcaacgtgcacagttaatcgctctgacacaggccctgaagatggcagagggcaaaaagttgaatgtctacaccaactcacgttatgcttttgcaacagcgcattggcatggcgaaatttaccgccgccgtggtctgctgactagtgagggtaaggaaattaaaaataaagatgagattcttgcgttgttaaaagctttattcttaccaaaacgcctttcgatcattcattgcccggggcatcaaaagggtcactcagcggaggtacgtggaaaccgtatggcggaccaagctgcccgtaaggcggcgatcacagagaccccggatacatcaacgctgttgatcgaaaacagctctccctacactagcgagcatttttaa

SEQ ID NO: 135 - DNA, 2115 bp, synthetic construct
  source 1..2115: mol_type = other DNA
atgggcagcagccatcatcatcatcatcacagcagcggcctggtgccgcgcggcagccatatgactttaaatattgaggatgagcatcgtttacatgagacatcaaaagaacccgacgtgagcttagggtcaacgtggctttctgacttcccccaggcgtgggcggagactggcggaatggggttagctgtccgccaagcaccgttgatcatcccgttaaaggcaacgtctacacctgtctctatcaaacagtaccccatgagtcgtgaggcccgcctggggattaagccacatattcgtcgcttgtatgaccaggggatcttggtcccatgtcaatctccgtggaacaccccccttcgtcccgtgaaaaagccaggtacaaacgattatcgtccagttcaagatcttcgcgaggtcaacaaacgcgtagaagacatccatccgactgtacctaatccttataatctgttatcaggcctgcccccatcgcaccaatggtatacagtattagacttgaaagacgcgttcttttgcctgcgtctgcacccaacgtctcagccgctgtttgcgttcgaatggcgtgatcctgaaatgggaatttcgggtcagttaacctggactcgtctgccccagggctttaaaaacagccccacattgttcgatgaagcacttcaccgtgacttagcagacttccgtatccaacacccagacttaattctgttacagtatgttgacgaccttttgttggcggcaacgtctgaacttgactgtcagcaaggcacacgcgcgttattacaaacgttaggtaacttaggatatcgtgcgtccgcgaaaaaggcgcaaatttgtcaaaaacaggtaaagtaccttgggtatttgctgaaagaaggtcaacgttggattactgatgcgcgtaaggagaccgtaatggggcagcctacgcctaagacgccacgcgaattgcgtgaatttttgggcaaagcgggattctgtcgtttatggattcctgggttcgctgaaatggctgcacccctgtaccccttaacaaaaacagggacgcttttcaactgggggccagaccagcaaaaggcgtatcaggagatcaaacaagctttgttgaccgcacccgcgttgggtcttccggatttaaccaagccctttgagctgttcgttgatgaaaaacagggatatgcaaaaggagtattaacccaaaagttaggcccgtggcgtcgccctgttgcttacttgagtaaaaaattggatcctgtcgcagcaggatggccaccgtgcttgcgtatggtcgcggcaattgccgttttgacaaaggatgcaggtaagttgacgatgggtcaacccttaaacatcttgtctccacatgctgtagaagcgttagtaaagcagcccccagaccgctggctttctaatgcgcgcatgacccactatcaggcgcttctgcttgatacggatcgtgtacaatttggaccagttgtagctttgaatccagctactttgcttccccttccagaagaaggacttcagcacaattgtttagatattctggccgaggcacatgggacgcgccctgatttgacggatcagccactgcctgatgccgaccatacatggtatactggcggcagtagtcttcttcaagaggggcaacgcaaggcgggagcagccgtcactacggagaccgaagttatctgggccaaagcgttacccgcgggaacatccgcgcaacgtgcacagttaatcgctctgacacaggccctgaagatggcagagggcaaaaagttgaatgtctacaccaactcacgttatgcttttgcaacagcgcattggcatggcgaaatttaccgccgccgtggtctgctgactagtgagggtaaggaaattaaaaataaagatgagattcttgcgttgttaaaagctttattcttaccaaaacgcctttcgatcattcattgcccggggcatcaaaagggtcactcagcggaggctcgtggaaaccgtatggcggaccaagctgcccgtaaggcggcgatcacagagaccccggatacatcaacgctgttgatcgaaaacagctctccctacactagcgagcatttttaa

SEQ ID NO: 136 - DNA, 1569 bp, synthetic construct
  source 1..1569: mol_type = other DNA
atgggcagcagccatcatcatcatcatcacagcagcggcctggtgccgcgcggcagccatatgactttaaatattgaggatgagcatcgtttacatgagacatcaaaagaacccgacgtgagcttagggtcaacgtggctttctgacttcccccaggcgtgggcggagactggcggaatggggttagctgtccgccaagcaccgttgatcatcccgttaaaggcaacgtctacacctgtctctatcaaacagtaccccatgagtcgtgaggcccgcctggggattaagccacatattcgtcgcttgtatgaccaggggatcttggtcccatgtcaatctccgtggaacaccccccttcgtcccgtgaaaaagccaggtacaaacgattatcgtccagttcaagatcttcgcgaggtcaacaaacgcgtagaagacatccatccgactgtacctaatccttataatctgttatcaggcctgcccccatcgcaccaatggtatacagtattagacttgaaagacgcgttcttttgcctgcgtctgcacccaacgtctcagccgctgtttgcgttcgaatggcgtgatcctgaaatgggaatttcgggtcagttaacctggactcgtctgccccagggctttaaaaacagccccacattgttcgatgaagcacttcaccgtgacttagcagacttccgtatccaacacccagacttaattctgttacagtatgttgacgaccttttgttggcggcaacgtctgaacttgactgtcagcaaggcacacgcgcgttattacaaacgttaggtaacttaggatatcgtgcgtccgcgaaaaaggcgcaaatttgtcaaaaacaggtaaagtaccttgggtatttgctgaaagaaggtcaacgttggattactgatgcgcgtaaggagaccgtaatggggcagcctacgcctaagacgccacgcgaattgcgtgaatttttgggcaaagcgggattctgtcgtttatggattcctgggttcgctgaaatggctgcacccctgtaccccttaacaaaaacagggacgcttttcaactgggggccagaccagcaaaaggcgtatcaggagatcaaacaagctttgttgaccgcacccgcgttgggtcttccggatttaaccaagccctttgagctgttcgttgatgaaaaacagggatatgcaaaaggagtattaacccaaaagttaggcccgtggcgtcgccctgttgcttacttgagtaaaaaattggatcctgtcgcagcaggatggccaccgtgcttgcgtatggtcgcggcaattgccgttttgacaaaggatgcaggtaagttgacgatgggtcaacccttaaacatcttggctccacatgctgtagaagcgttagtaaagcagcccccagaccgctggctttctaatgcgcgcatgacccactatcaggcgcttctgcttgatacggatcgtgtacaatttggaccagttgtagctttgaatccagctactttgcttccccttccagaagaaggacttcagcacaattgtttagatattctggccgagtaa

SEQ ID NO: 137 - DNA, 1671 bp, synthetic construct
  source 1..1671: mol_type = other DNA
atgggcagcagccatcatcatcatcatcacagcagcggcctggtgccgcgcggcagccatatgactttaaatattgaggatgagcatcgtttacatgagacatcaaaagaacccgacgtgagcttagggtcaacgtggctttctgacttcccccaggcgtgggcggagactggcggaatggggttagctgtccgccaagcaccgttgatcatcccgttaaaggcaacgtctacacctgtctctatcaaacagtaccccatgagtcgtgaggcccgcctggggattaagccacatattcgtcgcttgtatgaccaggggatcttggtcccatgtcaatctccgtggaacaccccccttcgtcccgtgaaaaagccaggtacaaacgattatcgtccagttcaagatcttcgcgaggtcaacaaacgcgtagaagacatccatccgactgtacctaatccttataatctgttatcaggcctgcccccatcgcaccaatggtatacagtattagacttgaaagacgcgttcttttgcctgcgtctgcacccaacgtctcagccgctgtttgcgttcgaatggcgtgatcctgaaatgggaatttcgggtcagttaacctggactcgtctgccccagggctttaaaaacagccccacattgttcgatgaagcacttcaccgtgacttagcagacttccgtatccaacacccagacttaattctgttacagtatgttgacgaccttttgttggcggcaacgtctgaacttgactgtcagcaaggcacacgcgcgttattacaaacgttaggtaacttaggatatcgtgcgtccgcgaaaaaggcgcaaatttgtcaaaaacaggtaaagtaccttgggtatttgctgaaagaaggtcaacgttggattactgatgcgcgtaaggagaccgtaatggggcagcctacgcctaagacgccacgcgaattgcgtgaatttttgggcaaagcgggattctgtcgtttatggattcctgggttcgctgaaatggctgcacccctgtaccccttaacaaaaacagggacgcttttcaactgggggccagaccagcaaaaggcgtatcaggagatcaaacaagctttgttgaccgcacccgcgttgggtcttccggatttaaccaagccctttgagctgttcgttgatgaaaaacagggatatgcaaaaggagtattaacccaaaagttaggcccgtggcgtcgccctgttgcttacttgagtaaaaaattggatcctgtcgcagcaggatggccaccgtgcttgcgtatggtcgcggcaattgccgttttgacaaaggatgcaggtaagttgacgatgggtcaacccttaaacatcttggctccacatgctgtagaagcgttagtaaagcagcccccagaccgctggctttctaatgcgcgcatgacccactatcaggcgcttctgcttgatacggatcgtgtacaatttggaccagttgtagctttgaatccagctactttgcttccccttccagaagaaggacttcagcacaattgtttagatattctggccgaggcacatgggacgcgccctgatttgacggatcagccactgcctgatgccgaccatacatggtatactggcggcagtagtcttcttcaagaggggcaacgcaagtaa

SEQ ID NO: 138 - DNA, 2115 bp, synthetic construct
  source 1..2115: mol_type = other DNA
atgggcagcagccatcatcatcatcatcacagcagcggcctggtgccgcgcggcagccatatgactttaaatattgaggatgagcatcgtttacatgagacatcaaaagaacccgacgtgagcttagggtcaacgtggctttctgacttcccccaggcgtgggcggagactggcggaatggggttagctgtccgccaagcaccgttgatcatcccgttaaaggcaacgtctacacctgtctctatcaaacagtaccccatgagtcgtgaggcccgcctggggattaagccacatattcgtcgcttgtatgaccaggggatcttggtcccatgtcaatctccgtggaacaccccccttcgtcccgtgaaaaagccaggtacaaacgattatcgtccagttcaagatcttcgcgaggtcaacaaacgcgtagaagacatccatccgactgtacctaatccttataatctgttatcaggcctgcccccatcgcaccaatggtatacagtattagacttgaaagacgcgttcttttgcctgcgtctgcacccaacgtctcagccgctgtttgcgttcgaatggcgtgatcctgaaatgggaatttcgggtcagttaacctggactcgtctgccccagggctttaaaaacagccccacattgttcgatgaagcacttcaccgtgacttagcagacttccgtatccaacacccagacttaattctgttacagtatgttgacgaccttttgttggcggcaacgtctgaacttgactgtcagcaaggcacacgcgcgttattacaaacgttaggtaacttaggatatcgtgcgtccgcgaaaaaggcgcaaatttgtcaaaaacaggtaaagtaccttgggtatttgctgaaagaaggtcaacgttggattactgatgcgcgtaaggagaccgtaatggggcagcctacgcctaagacgccacgcgaattgcgtgaatttttgggcaaagcgggattctgtcgtttatggattcctgggttcgctgaaatggctgcacccctgtaccccttaacaaaaacagggacgcttttcaactgggggccagaccagcaaaaggcgtatcaggagatcaaacaagctttgttgaccgcacccgcgttgggtcttccggatttaaccaagccctttgagctgttcgttgatgaaaaacagggatatgcaaaaggagtattaacccaaaagttaggcccgtggcgtcgccctgttgcttacttgagtaaaaaattggatcctgtcgcagcaggatggccaccgtgcttgcgtatggtcgcggcaattgccgttttgacaaaggatgcaggtaagttgacgatgggtcaacccttaaacatcttggctccacatgctgtagaagcgttagtaaagcagcccccagaccgctggctttctaatgcgcgcatgacccactatcaggcgcttctgcttgatacggatcgtgtacaatttggaccagttgtagctttgaatccagctactttgcttccccttccagaagaaggacttcagcacaattgtttagatattctggccgaggcacatgggacgcgccctgatttgacggatcagccactgcctgatgccgaccatacatggtatactggcggcagtagtcttcttcaagaggggcaacgcaaggcgggagcagccgtcactacggagaccgaagttatctgggccaaagcgttacccgcgggaacatccgcgcaacgtgcacagttaatcgctctgacacaggccctgaagatggcagagggcaaaaagttgaatgtctacaccaactcacgttatgcttttgcaacagcgcattggcatggcgaaatttaccgccgccgtggtctgctgactagtgagggtaaggaaattaaaaataaagatgagattcttctgttgttaaaagctttattcttaccaaaacgcctttcgatcattcattgcccggggcatcaaaagggtcactcagcggaggctcgtggaaaccgtatggcggaccaagctgcccgtaaggcggcgatcacagagaccccggatacatcaacgctgttgatcgaaaacagctctccctacactagcgagcatttttaa

SEQ ID NO: 139 - DNA, 2115 bp, synthetic construct
  source 1..2115: mol_type = other DNA
atgggcagcagccatcatcatcatcatcacagcagcggcctggtgccgcgcggcagccatatgactttaaatattgaggatgagcatcgtttacatgagacatcaaaagaacccgacgtgagcttagggtcaacgtggctttctgacttcccccaggcgtgggcggagactggcggaatggggttagctgtccgccaagcaccgttgatcatcccgttaaaggcaacgtctacacctgtctctatcaaacagtaccccatgagtcgtgaggcccgcctggggattaagccacatattcgtcgcttgtatgaccaggggatcttggtcccatgtcaatctccgtggaacaccccccttcgtcccgtgaaaaagccaggtacaaacgattatcgtccagttcaagatcttcgcgaggtcaacaaacgcgtagaagacatccatccgactgtacctaatccttataatctgttatcaggcctgcccccatcgcaccaatggtatacagtattagacttgaaagacgcgttctttgcgctgcgtctgcacccaacgtctcagccgctgtttgcgttcgaatggcgtgatcctgaaatgggaatttcgggtcagttaacctggactcgtctgccccagggctttaaaaacagccccacattgttcgatgaagcacttcaccgtgacttagcagacttccgtatccaacacccagacttaattctgttacagtatgttgacgaccttttgttggcggcaacgtctgaacttgactgtcagcaaggcacacgcgcgttattacaaacgttaggtaacttaggatatcgtgcgtccgcgaaaaaggcgcaaatttgtcaaaaacaggtaaagtaccttgggtatttgctgaaagaaggtcaacgttggattactgatgcgcgtaaggagaccgtaatggggcagcctacgcctaagacgccacgcgaattgcgtgaatttttgggcaaagcgggattctgtcgtttatggattcctgggttcgctgaaatggctgcacccctgtaccccttaacaaaaacagggacgcttttcaactgggggccagaccagcaaaaggcgtatcaggagatcaaacaagctttgttgaccgcacccgcgttgggtcttccggatttaaccaagccctttgagctgttcgttgatgaaaaacagggatatgcaaaaggagtattaacccaaaagttaggcccgtggcgtcgccctgttgcttacttgagtaaaaaattggatcctgtcgcagcaggatggccaccgtgcttgcgtatggtcgcggcaattgccgttttgacaaaggatgcaggtaagttgacgatgggtcaacccttaaacatcttggctccacatgctgtagaagcgttagtaaagcagcccccagaccgctggctttctaatgcgcgcatgacccactatcaggcgcttctgcttgatacggatcgtgtacaatttggaccagttgtagctttgaatccagctactttgcttccccttccagaagaaggacttcagcacaattgtttagatattctggccgaggcacatgggacgcgccctgatttgacggatcagccactgcctgatgccgaccatacatggtatactggcggcagtagtcttcttcaagaggggcaacgcaaggcgggagcagccgtcactacggagaccgaagttatctgggccaaagcgttacccgcgggaacatccgcgcaacgtgcacagttaatcgctctgacacaggccctgaagatggcagagggcaaaaagttgaatgtctacaccaactcacgttatgcttttgcaacagcgcattggcatggcgaaatttaccgccgccgtggtctgctgactagtgagggtaaggaaattaaaaataaagatgagattcttgcgttgttaaaagctttattcttaccaaaacgcctttcgatcattcattgcccggggcatcaaaagggtcactcagcggaggctcgtggaaaccgtatggcggaccaagctgcccgtaaggcggcgatcacagagaccccggatacatcaacgctgttgatcgaaaacagctctccctacactagcgagcatttttaa

SEQ ID NO: 140 - DNA, 2115 bp, synthetic construct
  source 1..2115: mol_type = other DNA
atgggcagcagccatcatcatcatcatcacagcagcggcctggtgccgcgcggcagccatatgactttaaatattgaggatgagcatcgtttacatgagacatcaaaagaacccgacgtgagcttagggtcaacgtggctttctgacttcccccaggcgtgggcggagactggcggaatggggttagctgtccgccaagcaccgttgatcatcccgttaaaggcaacgtctacacctgtctctatcaaacagtaccccatgagtcgtgaggcccgcctggggattaagccacatattcgtcgcttgtatgaccaggggatcttggtcccatgtcaatctccgtggaacaccccccttcgtcccgtgaaaaagccaggtacaaacgattatcgtccagttcaagatcttcgcgaggtcaacaaacgcgtagaagacatccatccgactgtacctaatccttataatctgttatcaggcctgcccccatcgcaccaatggtatacagtattagacttgaaagacgcgttcttttgcctgcgtctgcacccaacgtctcagccgctgtttgcgttcgaatggcgtgatcctgaaatgggaatttcgggtcagttaacctggactcgtctgccccagggctttaaaaacagccccacattgttcgatgaagcacttcaccgtgacttagcagacttccgtatccaacacccagacttaattctgttacagtatgttgacgaccttttgttggcggcaacgtctgaacttgactgtcagcaaggcacacgcgcgttattacaaacgttaggtaacttaggatatcgtgcgtccgcgaaaaaggcgcaaatttgtcaaaaacaggtaaagtaccttgggtatttgctgaaagaaggtcaacgttggattactgatgcgcgtaaggagaccgtaatggggcagcctacgcctaagacgccacgcgaattgcgtgaatttttgggcaaagcgggattctgtcgtttatggattcctgggttcgctgaaatggctgcacccctgtaccccttaacaaaaacagggacgcttttcaactgggggccagaccagcaaaaggcgtatcaggagatcaaacaagctttgttgaccgcacccgcgttgggtcttccggatttaaccaagccctttgagctgttcgttgatgaaaaacagggatatgcaaaaggagtattaacccaaaagttaggcccgtggcgtcgccctgttgcttacttgagtaaaaaattggatcctgtcgcagcaggatggccaccgtgcttgcgtatggtcgcggcaattgccgttttgacaaaggatgcaggtaagttgacgatgggtcaacccttaaacatcttggctccacatgctgtagaagcgttagtaaagcagcccccagaccgctggctttctaatgcgcgcatgacccactatcaggcgcttctgcttgatacggatcgtgtacaatttggaccagttgtagctttgaatccagctactttgcttccccttccagaagaaggacttcagcacaattgtttagatattctggccgaggcacatgggacgcgccctgatttgacggatcagccactgcctgatgccgaccatacatggtatactggcggcagtagtcttcttcaagaggggcaacgcaaggcgggagcagccgtcactacggagaccgaagttatctgggccaaagcgttacccgcgggaacatccgcgcaacgtgcacagttaatcgctctgacacaggccctgaagatggcagagggcaaaaagttgaatgtctacaccaactcacgttatgcttttgcaacagcgcattggcatggcgaaatttaccgccgccgtggtctgctgactagtgagggtaaggaaattaaaaataaacccgagattcttgcgttgttaaaagctttattcttaccaaaacgcctttcgatcattcattgcccggggcatcaaaagggtcactcagcggaggctcgtggaaaccgtatggcggaccaagctgcccgtaaggcggcgatcacagagaccccggatacatcaacgctgttgatcgaaaacagctctccctacactagcgagcatttttaa

SEQ ID NO: 141 - DNA, 2115 bp, synthetic construct
  source 1..2115: mol_type = other DNA
atgggcagcagccatcatcatcatcatcacagcagcggcctggtgccgcgcggcagccatatgactttaaatattgaggatgagcatcgtttacatgagacatcaaaagaacccgacgtgagcttagggtcaacgtggctttctgacttcccccaggcgtgggcggagactggcggaatggggttagctgtccgccaagcaccgttgatcatcccgttaaaggcaacgtctacacctgtctctatcaaacagtaccccatgagtcgtgaggcccgcctggggattaagccacatattcgtcgcttgtatgaccaggggatcttggtcccatgtcaatctccgtggaacaccccccttcgtcccgtgaaaaagccaggtacaaacgattatcgtccagttcaagatcttcgcgaggtcaacaaacgcgtagaagacatccatccgactgtacctaatccttataatctgttatcaggcctgcccccatcgcaccaatggtatacagtattagacttgaaagacgcgttcttttgcctgcgtctgcacccaacgtctcagccgctgtttgcgttcgaatggcgtgatcctgaaatgggaatttcgggtcagttaacctggactcgtctgccccagggctttaaaaacagccccacattgttcgatgaagcacttcaccgtgacttagcagacttccgtatccaacacccagacttaattctgttacagtatgttgacgaccttttgttggcggcaacgtctgaacttgactgtcagcaaggcacacgcgcgttattacaaacgttaggtaacttaggatatcgtgcgtccgcgaaaaaggcgcaaatttgtcaaaaacaggtaaagtaccttgggtatttgctgaaagaaggtcaacgttggattactgatgcgcgtaaggagaccgtaatggggcagcctacgcctaagacgccacgcgaattgcgtgaatttttgggcaaagcgggattctgtcgtttatggattcctgggttcgctgaaatggctgcacccctgtaccccttaacaaaaacagggacgcttttcaactgggggccagaccagcaaaaggcgtatcaggagatcaaacaagctttgttgaccgcacccgcgttgggtcttccggatttaaccaagccctttgagctgttcgttgatgaaaaacagggatatgcaaaaggagtattaacccaaaagttaggcccgtggcgtcgccctgttgcttacttgagtaaaaaattggatcctgtcgcagcaggatggccaccgtgcttgcgtatggtcgcggcaattgccgttttgacaaaggatgcaggtaagttgacgatgggtcaacccttaaacatcttggctccacatgctgtagaagcgttagtaaagcagcccccagaccgctggctttctaatgcgcgcatgacccactatcaggcgcttctgcttgatacggatcgtgtacaatttggaccagttgtagctttgaatccagctactttgcttccccttccagaagaaggacttcagcacaattgtttagatattctggccgaggcacatgggacgcgccctgatttgacggatcagccactgcctgatgccgaccatacatggtatactggcggcagtagtcttcttcaagaggggcaacgcaaggcgggagcagccgtcactacggagaccgaagttatctgggccaaagcgttacccgcgggaacatccgcgcaacgtgcacagttaatcgctctgacacaggccctgaagatggcagagggcaaaaagttgaatgtctacaccaactcacgttatgcttttgcaacagcgcattggcatggcgaaatttaccgccgccgtggtctgctgactagtgagggtaaggaaattaaaaataaacgtgagattcttgcgttgttaaaagctttattcttaccaaaacgcctttcgatcattcattgcccggggcatcaaaagggtcactcagcggaggctcgtggaaaccgtatggcggaccaagctgcccgtaaggcggcgatcacagagaccccggatacatcaacgctgttgatcgaaaacagctctccctacactagcgagcatttttaa

SEQ ID NO: 142 - DNA, 2115 bp, synthetic construct
  source 1..2115: mol_type = other DNA
atgggcagcagccatcatcatcatcatcacagcagcggcctggtgccgcgcggcagccatatgactttaaatattgaggatgagcatcgtttacatgagacatcaaaagaacccgacgtgagcttagggtcaacgtggctttctgacttcccccaggcgtgggcggagactggcggaatggggttagctgtccgccaagcaccgttgatcatcccgttaaaggcaacgtctacacctgtctctatcaaacagtaccccatgagtcgtgaggcccgcctggggattaagccacatattcgtcgcttgtatgaccaggggatcttggtcccatgtcaatctccgtggaacaccccccttcgtcccgtgaaaaagccaggtacaaacgattatcgtccagttcaagatcttcgcgaggtcaacaaacgcgtagaagacatccatccgactgtacctaatccttataatctgttatcaggcctgcccccatcgcaccaatggtatacagtattagacttgaaagacgcgttcttttgcctgcgtctgcacccaacgtctcagccgctgtttgcgttcgaatggcgtgatcctgaaatgggaatttcgggtcagttaacctggactcgtctgccccagggctttaaaaacagccccacattgttcgatgaagcacttcaccgtgacttagcagacttccgtatccaacacccagacttaattctgttacagtatgttgacgaccttttgttggcggcaacgtctgaacttgactgtcagcaaggcacacgcgcgttattacaaacgttaggtaacttaggatatcgtgcgtccgcgaaaaaggcgcaaatttgtcaaaaacaggtaaagtaccttgggtatttgctgaaagaaggtcaacgttggattactgatgcgcgtaaggagaccgtaatggggcagcctacgcctaagacgccacgcgaattgcgtgaatttttgggcaaagcgggattctgtcgtttatggattcctgggttcgctgaaatggctgcacccctgtaccccttaacaaaaacagggacgcttttcaactgggggccagaccagcaaaaggcgtatcaggagatcaaacaagctttgttgaccgcacccgcgttgggtcttccggatttaaccaagccctttgagctgttcgttgatgaaaaacagggatatgcaaaaggagtattaacccaaaagttaggcccgtggcgtcgccctgttgcttacttgagtaaaaaattggatcctgtcgcagcaggatggccaccgtgcttgcgtatggtcgcggcaattgccgttttgacaaaggatgcaggtaagttgacgatgggtcaacccttaaacatcttggctccacatgctgtagaagcgttagtaaagcagcccccagaccgctggctttctaatgcgcgcatgacccactatcaggcgcttctgcttgatacggatcgtgtacaatttggaccagttgtagctttgaatccagctactttgcttccccttccagaagaaggacttcagcacaattgtttagatattctggccgaggcacatgggacgcgccctgatttgacggatcagccactgcctgatgccgaccatacatggtatactggcggcagtagtcttcttcaatctgggcaacgcaaggcgggagcagccgtcactacggagaccgaagttatctgggccaaagcgttacccgcgggaacatccgcgcaacgtgcacagttaatcgctctgacacaggccctgaagatggcagagggcaaaaagttgaatgtctacaccaactcacgttatgcttttgcaacagcgcattggcatggcgaaatttaccgccgccgtggtctgctgactagtgagggtaaggaaattaaaaataaagatgagattcttgcgttgttaaaagctttattcttaccaaaacgcctttcgatcattcattgcccggggcatcaaaagggtcactcagcggaggctcgtggaaaccgtatggcggaccaagctgcccgtaaggcggcgatcacagagaccccggatacatcaacgctgttgatcgaaaacagctctccctacactagcgagcatttttaa

SEQ ID NO: 143 - DNA, 2115 bp, synthetic construct
  source 1..2115: mol_type = other DNA
atgggcagcagccatcatcatcatcatcacagcagcggcctggtgccgcgcggcagccatatgactttaaatattgaggatgagcatcgtttacatgagacatcaaaagaacccgacgtgagcttagggtcaacgtggctttctgacttcccccaggcgtgggcggagactggcggaatggggttagctgtccgccaagcaccgttgatcatcccgttaaaggcaacgtctacacctgtctctatcaaacagtaccccatgagtcgtgaggcccgcctggggattaagccacatattcgtcgcttgtatgaccaggggatcttggtcccatgtcaatctccgtggaacaccccccttcgtcccgtgaaaaagccaggtacaaacgattatcgtccagttcaagatcttcgcgaggtcaacaaacgcgtagaagacatccatccgactgtacctaatccttataatctgttatcaggcctgcccccatcgcaccaatggtatacagtattagacttgaaagacgcgttcttttgcctgcgtctgcacccaacgtctcagccgctgtttgcgttcgaatggcgtgatcctgaaatgggaatttcgggtcagttaacctggactcgtctgccccagggctttaaaaacagccccacattgttcgatgaagcacttcaccgtgacttagcagacttccgtatccaacacccagacttaattctgttacagtatgttgacgaccttttgttggcggcaacgtctgaacttgactgtcagcaaggcacacgcgcgttattacaaacgttaggtaacttaggatatcgtgcgtccgcgaaaaaggcgcaaatttgtcaaaaacaggtaaagtaccttgggtatttgctgaaagaaggtcaacgttggattactgatgcgcgtaaggagaccgtaatggggcagcctacgcctaagacgccacgcgaattgcgtgaatttttgggcaaagcgggattctgtcgtttatggattcctgggttcgctgaaatggctgcacccctgtaccccttaacaaaaacagggacgcttttcaactgggggccagaccagcaaaaggcgtatcaggagatcaaacaagctttgttgaccgcacccgcgttgggtcttccggatttaaccaagccctttgagctgttcgttgatgaaaaacagggatatgcaaaaggagtattaacccaaaagttaggcccgtggcgtcgccctgttgcttacttgagtaaaaaattggatcctgtcgcagcaggatggccaccgtgcttgcgtatggtcgcggcaattgccgttttgacaaaggatgcaggtaagttgacgatgggtcaacccttaaacatcttggctccacatgctgtagaagcgttagtaaagcagcccccagaccgctggctttctaatgcgcgcatgacccactatcaggcgcttctgcttgatacggatcgtgtacaatttggaccagttgtagctttgaatccagctactttgcttccccttccagaagaaggacttcagcacaattgtttagatattctggccgaggcacatgggacgcgccctgatttgacggatcagccactgcctgatgccgaccatacatggtatactggcggcagtagtcttcttcaagaggggcaacgcaaggcgggagcagccgtcactacggagaccgaagttatctgggccaaagcgttacccgcgggaacatccgcgcaacgtgcacagttaatcgctctgacacaggccctgaagatggcagagggcaaaaagttgaatgtctacaccaactcacgttatgcttttgcaacagcgcattggcatggcgaaatttaccgccgccgtggtctgctgactagttctggtaaggaaattaaaaataaagatgagattcttgcgttgttaaaagctttattcttaccaaaacgcctttcgatcattcattgcccggggcatcaaaagggtcactcagcggaggctcgtggaaaccgtatggcggaccaagctgcccgtaaggcggcgatcacagagaccccggatacatcaacgctgttgatcgaaaacagctctccctacactagcgagcatttttaa

SEQ ID NO: 144 - DNA, 2115 bp, synthetic construct
  source 1..2115: mol_type = other DNA
atgggcagcagccatcatcatcatcatcacagcagcggcctggtgccgcgcggcagccatatgactttaaatattgaggatccccatcgtttacatgagacatcaaaagaacccgacgtgagcttagggtcaacgtggctttctgacttcccccaggcgtgggcggagactggcggaatggggttagctgtccgccaagcaccgttgatcatcccgttaaaggcaacgtctacacctgtctctatcaaacagtaccccatgagtcgtgaggcccgcctggggattaagccacatattcgtcgcttgtatgaccaggggatcttggtcccatgtcaatctccgtggaacaccccccttcgtcccgtgaaaaagccaggtacaaacgattatcgtccagttcaagatcttcgcgaggtcaacaaacgcgtagaagacatccatccgactgtacctaatccttataatctgttatcaggcctgcccccatcgcaccaatggtatacagtattagacttgaaagacgcgttcttttgcctgcgtctgcacccaacgtctcagccgctgtttgcgttcgaatggcgtgatcctgaaatgggaatttcgggtcagttaacctggactcgtctgccccagggctttaaaaacagccccacattgttcgatgaagcacttcaccgtgacttagcagacttccgtatccaacacccagacttaattctgttacagtatgttgacgaccttttgttggcggcaacgtctgaacttgactgtcagcaaggcacacgcgcgttattacaaacgttaggtaacttaggatatcgtgcgtccgcgaaaaaggcgcaaatttgtcaaaaacaggtaaagtaccttgggtatttgctgaaagaaggtcaacgttggattactgatgcgcgtaaggagaccgtaatggggcagcctacgcctaagacgccacgcgaattgcgtgaatttttgggcaaagcgggattctgtcgtttatggattcctgggttcgctgaaatggctgcacccctgtaccccttaacaaaaacagggacgcttttcaactgggggccagaccagcaaaaggcgtatcaggagatcaaacaagctttgttgaccgcacccgcgttgggtcttccggatttaaccaagccctttgagctgttcgttgatgaaaaacagggatatgcaaaaggagtattaacccaaaagttaggcccgtggcgtcgccctgttgcttacttgagtaaaaaattggatcctgtcgcagcaggatggccaccgtgcttgcgtatggtcgcggcaattgccgttttgacaaaggatgcaggtaagttgacgatgggtcaacccttaaacatcttggctccacatgctgtagaagcgttagtaaagcagcccccagaccgctggctttctaatgcgcgcatgacccactatcaggcgcttctgcttgatacggatcgtgtacaatttggaccagttgtagctttgaatccagctactttgcttccccttccagaagaaggacttcagcacaattgtttagatattctggccgaggcacatgggacgcgccctgatttgacggatcagccactgcctgatgccgaccatacatggtatactggcggcagtagtcttcttcaagaggggcaacgcaaggcgggagcagccgtcactacggagaccgaagttatctgggccaaagcgttacccgcgggaacatccgcgcaacgtgcacagttaatcgctctgacacaggccctgaagatggcagagggcaaaaagttgaatgtctacaccaactcacgttatgcttttgcaacagcgcattggcatggcgaaatttaccgccgccgtggtctgctgactagtgagggtaaggaaattaaaaataaagatgagattcttgcgttgttaaaagctttattcttaccaaaacgcctttcgatcattcattgcccggggcatcaaaagggtcactcagcggaggctcgtggaaaccgtatggcggaccaagctgcccgtaaggcggcgatcacagagaccccggatacatcaacgctgttgatcgaaaacagctctccctacactagcgagcatttttaa

SEQ ID NO: 145 - DNA, 2115 bp, synthetic construct
  source 1..2115: mol_type = other DNA
atgggcagcagccatcatcatcatcatcacagcagcggcctggtgccgcgcggcagccatatgactttaaatattgaggatgagcatcgtttacatgagacatcaaaagaacccgacgtgagcttagggtcaacgtggctttctgacttcccccaggcgtgggcggagactggcggaatggggttagctgtccgccaagcaccgttgatcatcccgttaaaggcaacgtctacacctgtctctatcaaacagtaccccatgagtcgtgaggcccgcctggggattaagccacatattcgtcgcttgtatgaccaggggatcttggtcccatgtcaatctccgtggaacaccccccttcgtcccgtgaaaaagccaggtacaaacgattatcgtccagttcaagatcttcgcgaggtcaacaaacgcgtagaagacatccatccgactgtacctaatccttataatctgttatcaggcctgcccccatcgcaccaatggtatacagtattagacttgaaagacgcgttcgtatgcctgcgtctgcacccaacgtctcagccgctgtttgcgttcgaatggcgtgatcctgaaatgggaatttcgggtcagttaacctggactcgtctgccccagggctttaaaaacagccccacattgttcgatgaagcacttcaccgtgacttagcagacttccgtatccaacacccagacttaattctgttacagtatgttgacgaccttttgttggcggcaacgtctgaacttgactgtcagcaaggcacacgcgcgttattacaaacgttaggtaacttaggatatcgtgcgtccgcgaaaaaggcgcaaatttgtcaaaaacaggtaaagtaccttgggtatttgctgaaagaaggtcaacgttggattactgatgcgcgtaaggagaccgtaatggggcagcctacgcctaagacgccacgcgaattgcgtgaatttttgggcaaagcgggattctgtcgtttatggattcctgggttcgctgaaatggctgcacccctgtaccccttaacaaaaacagggacgcttttcaactgggggccagaccagcaaaaggcgtatcaggagatcaaacaagctttgttgaccgcacccgcgttgggtcttccggatttaaccaagccctttgagctgttcgttgatgaaaaacagggatatgcaaaaggagtattaacccaaaagttaggcccgtggcgtcgccctgttgcttacttgagtaaaaaattggatcctgtcgcagcaggatggccaccgtgcttgcgtatggtcgcggcaattgccgttttgacaaaggatgcaggtaagttgacgatgggtcaacccttaaacatcttggctccacatgctgtagaagcgttagtaaagcagcccccagaccgctggctttctaatgcgcgcatgacccactatcaggcgcttctgcttgatacggatcgtgtacaatttggaccagttgtagctttgaatccagctactttgcttccccttccagaagaaggacttcagcacaattgtttagatattctggccgaggcacatgggacgcgccctgatttgacggatcagccactgcctgatgccgaccatacatggtatactggcggcagtagtcttcttcaagaggggcaacgcaaggcgggagcagccgtcactacggagaccgaagttatctgggccaaagcgttacccgcgggaacatccgcgcaacgtgcacagttaatcgctctgacacaggccctgaagatggcagagggcaaaaagttgaatgtctacaccaactcacgttatgcttttgcaacagcgcattggcatggcgaaatttaccgccgccgtggtctgctgactagtgagggtaaggaaattaaaaataaagatgagattcttgcgttgttaaaagctttattcttaccaaaacgcctttcgatcattcattgcccggggcatcaaaagggtcactcagcggaggctcgtggaaaccgtatggcggaccaagctgcccgtaaggcggcgatcacagagaccccggatacatcaacgctgttgatcgaaaacagctctccctacactagcgagcatttttaa

SEQ ID NO: 146 - DNA, 2115 bp, synthetic construct
  source 1..2115: mol_type = other DNA
atgggcagcagccatcatcatcatcatcacagcagcggcctggtgccgcgcggcagccatatgactttaaatattgaggatgagcatcgtttacatgagacatcaaaagaacccgacgtgagcttagggtcaacgtggctttctgacttcccccaggcgtgggcggagactggcggaatggggttagctgtccgccaagcaccgttgatcatcccgttaaaggcaacgtctacacctgtctctatcaaacagtaccccatgagtcgtgaggcccgcctggggattaagccacatattcgtcgcttgtatgaccaggggatcttggtcccatgtcaatctccgtggaacaccccccttcgtcccgtgaaaaagccaggtacaaacgattatcgtccagttcaagatcttcgcgaggtcaacaaacgcgtagaagacatccatccgactgtacctaatccttataatctgttatcatctctgcccccatcgcaccaatggtatacagtattagacttgaaagacgcgttcttttgcctgcgtctgcacccaacgtctcagccgctgtttgcgttcgaatggcgtgatcctgaaatgggaatttcgggtcagttaacctggactcgtctgccccagggctttaaaaacagccccacattgttcgatgaagcacttcaccgtgacttagcagacttccgtatccaacacccagacttaattctgttacagtatgttgacgaccttttgttggcggcaacgtctgaacttgactgtcagcaaggcacacgcgcgttattacaaacgttaggtaacttaggatatcgtgcgtccgcgaaaaaggcgcaaatttgtcaaaaacaggtaaagtaccttgggtatttgctgaaagaaggtcaacgttggattactgatgcgcgtaaggagaccgtaatggggcagcctacgcctaagacgccacgcgaattgcgtgaatttttgggcaaagcgggattctgtcgtttatggattcctgggttcgctgaaatggctgcacccctgtaccccttaacaaaaacagggacgcttttcaactgggggccagaccagcaaaaggcgtatcaggagatcaaacaagctttgttgaccgcacccgcgttgggtcttccggatttaaccaagccctttgagctgttcgttgatgaaaaacagggatatgcaaaaggagtattaacccaaaagttaggcccgtggcgtcgccctgttgcttacttgagtaaaaaattggatcctgtcgcagcaggatggccaccgtgcttgcgtatggtcgcggcaattgccgttttgacaaaggatgcaggtaagttgacgatgggtcaacccttaaacatcttggctccacatgctgtagaagcgttagtaaagcagcccccagaccgctggctttctaatgcgcgcatgacccactatcaggcgcttctgcttgatacggatcgtgtacaatttggaccagttgtagctttgaatccagctactttgcttccccttccagaagaaggacttcagcacaattgtttagatattctggccgaggcacatgggacgcgccctgatttgacggatcagccactgcctgatgccgaccatacatggtatactggcggcagtagtcttcttcaagaggggcaacgcaaggcgggagcagccgtcactacggagaccgaagttatctgggccaaagcgttacccgcgggaacatccgcgcaacgtgcacagttaatcgctctgacacaggccctgaagatggcagagggcaaaaagttgaatgtctacaccaactcacgttatgcttttgcaacagcgcattggcatggcgaaatttaccgccgccgtggtctgctgactagtgagggtaaggaaattaaaaataaagatgagattcttgcgttgttaaaagctttattcttaccaaaacgcctttcgatcattcattgcccggggcatcaaaagggtcactcagcggaggctcgtggaaaccgtatggcggaccaagctgcccgtaaggcggcgatcacagagaccccggatacatcaacgctgttgatcgaaaacagctctccctacactagcgagcatttttaa

SEQ ID NO: 147 - DNA, 2115 bp, synthetic construct
  source 1..2115: mol_type = other DNA
atgggcagcagccatcatcatcatcatcacagcagcggcctggtgccgcgcggcagccatatgactttaaatattgaggatgagcatcgtttacatgagacatcaaaagaacccgacgtgagcttagggtcaacgtggctttctgacttcccccaggcgtgggcggagactggcggaatggggttagctgtccgccaagcaccgttgatcatcccgttaaaggcaacgtctacacctgtctctatcaaacagtaccccatgagtcgtgaggcccgcctggggattaagccacatattcgtcgcttgtatgaccaggggatcttggtcccatgtcaatctccgtggaacaccccccttcgtcccgtgaaaaagccaggtacaaacgattatcgtccagttcaagatcttcgcgaggtcaacaaacgcgtagaagacatccatccgactgtacctaatccttataatctgttatcaggcctgcccccatcgcaccaatggtatacagtattagacttgaaagacgcgttcttttgcctgcgtctgcacccaacgtctcagccgctgtttgcgttcgaatggcgtgatcctgaaatgggaatttcgggtcagttaacctggactcgtctgccccagggctttaaaaacagccccacattgttcgatgaagcacttcaccgtgacttagcagacttccgtatccaacacccagacttaattctgttacagtatgttgacgaccttttgttggcggcaacgtctgaacttgactgtcagcaaggcacacgcgcgttattacaaacgttaggtaacttaggatatcgtgcgtccgcgaaaaaggcgcaaatttgtcaaaaacaggtaaagtaccttgggtatttgctgaaagaaggtcaacgttggattactgatgcgcgtaaggagaccgtaatggggcagcctacgcctaagacgccacgcgaattgcgtgaatttttgggcaaagcgggattctgtcgtttatggattcctgggttcgctgaaatggctgcacccctgtaccccttaacaaaaacagggacgcttttcaactgggggccagaccagcaaaaggcgtatcaggagatcaaacaagctttgttgaccgcacccgcgttgggtcttccggatttaaccaagccctttgagctgttcgttgatgaaaaacagggatatgcaaaaggagtattaacccaaaagttaggcccgtggcgtcgccctgttgcttacttgagtaaaaaattggatcctgtcgcagcaggatggccaccgtgcttgcgtatggtcgcggcaattgccgttttgacaaaggatgcatctaagttgacgatgggtcaacccttaaacatcttggctccacatgctgtagaagcgttagtaaagcagcccccagaccgctggctttctaatgcgcgcatgacccactatcaggcgcttctgcttgatacggatcgtgtacaatttggaccagttgtagctttgaatccagctactttgcttccccttccagaagaaggacttcagcacaattgtttagatattctggccgaggcacatgggacgcgccctgatttgacggatcagccactgcctgatgccgaccatacatggtatactggcggcagtagtcttcttcaagaggggcaacgcaaggcgggagcagccgtcactacggagaccgaagttatctgggccaaagcgttacccgcgggaacatccgcgcaacgtgcacagttaatcgctctgacacaggccctgaagatggcagagggcaaaaagttgaatgtctacaccaactcacgttatgcttttgcaacagcgcattggcatggcgaaatttaccgccgccgtggtctgctgactagtgagggtaaggaaattaaaaataaagatgagattcttgcgttgttaaaagctttattcttaccaaaacgcctttcgatcattcattgcccggggcatcaaaagggtcactcagcggaggctcgtggaaaccgtatggcggaccaagctgcccgtaaggcggcgatcacagagaccccggatacatcaacgctgttgatcgaaaacagctctccctacactagcgagcatttttaa

SEQ ID NO: 148 - DNA, 2115 bp, synthetic construct
  source 1..2115: mol_type = other DNA
atgggcagcagccatcatcatcatcatcacagcagcggcctggtgccgcgcggcagccatatgactttaaatattgaggatgagcatcgtttacatgagacatcaaaagaacccgacgtgagcttagggtcaacgtggctttctgacttcccccaggcgtgggcggagactggcggaatggggttagctgtccgccaagcaccgttgatcatcccgttaaaggcaacgtctacacctgtctctatcaaacagtaccccatgagtcgtgaggcccgcctggggattaagccacatattcgtcgcttgtatgaccaggggatcttggtcccatgtcaatctccgtggaacaccccccttcgtcccgtgaaaaagccaggtacaaacgattatcgtccagttcaagatcttcgcgaggtcaacaaacgcgtagaagacatccatccgactgtacctaatccttataatctgttatcaggcctgcccccatcgcaccaatggtatacagtattagacttgaaagacgcgttcttttgcctgcgtctgcacccaacgtctcagccgctgtttgcgttcgaatggcgtgatcctgaaatgggaatttcgggtcagttaacctggactcgtctgccccagggctttaaaaacagccccacattgttcgatgaagcacttcaccgtgacttagcagacttccgtatccaacacccagacttaattctgttacagtatgttgacgaccttttgttggcggcaacgtctgaacttgactgtcagcaaggcacacgcgcgttattacaaacgttaggtaacttaggatatcgtgcgtccgcgaaaaaggcgcaaatttgtcaaaaacaggtaaagtaccttgggtatttgctgaaagaaggtcaacgttggattactgatgcgcgtaaggagaccgtaatggggcagcctacgcctaagacgccacgcgaattgcgtgaatttttgggcaaagcgggattctgtcgtttatggattcctgggttcgctgaaatggctgcacccctgtaccccttaacaaaaacagggacgcttttcaactgggggccagaccagcaaaaggcgtatcaggagatcaaacaagctttgttgaccgcacccgcgttgggtcttccggatttaaccaagccctttgagctgttcgttgatgaaaaacagggatatgcaaaaggagtattaacccaaaagttaggcccgtggcgtcgccctgttgcttacttgagtaaaaaattggatcctgtcgcagcaggatggccaccgtgcttgcgtatggtcgcggcaattgccgttttgacaaaggatgcaggtaagttgacgatgggtcaacccttaaacatcttggctccacatgctgtagaagcgttagtaaagcagcccccagaccgctggctttctaatgcgcgcatgacccactatcaggcgcttctgcttgatacggatcgtgtacaatttggaccagttgtagctttgaatccagctactttgcttccccttccagaagaaggacttcagcacaattgtttagatattctggccgaggcacatgcgacgcgccctgatttgacggatcagccactgcctgatgccgaccatacatggtatactggcggcagtagtcttcttcaagaggggcaacgcaaggcgggagcagccgtcactacggagaccgaagttatctgggccaaagcgttacccgcgggaacatccgcgcaacgtgcacagttaatcgctctgacacaggccctgaagatggcagagggcaaaaagttgaatgtctacaccaactcacgttatgcttttgcaacagcgcattggcatggcgaaatttaccgccgccgtggtctgctgactagtgagggtaaggaaattaaaaataaagatgagattcttgcgttgttaaaagctttattcttaccaaaacgcctttcgatcattcattgcccggggcatcaaaagggtcactcagcggaggctcgtggaaaccgtatggcggaccaagctgcccgtaaggcggcgatcacagagaccccggatacatcaacgctgttgatcgaaaacagctctccctacactagcgagcatttttaa

SEQ ID NO: 149 - DNA, 2115 bp, synthetic construct
  source 1..2115: mol_type = other DNA
atgggcagcagccatcatcatcatcatcacagcagcggcctggtgccgcgcggcagccatatgactttaaatattgaggatgagcatcgtttacatgagacatcaaaagaacccgacgtgagcttagggtcaacgtggctttctgacttcccccaggcgtgggcggagactggcggaatggggttagctgtccgccaagcaccgttgatcatcccgttaaaggcaacgtctacacctgtctctatcaaacagtaccccatgagtcgtgaggcccgcctggggattaagccacatattcgtcgcttgtatgaccaggggatcttggtcccatgtcaatctccgtggaacaccccccttcgtcccgtgaaaaagccaggtacaaacgattatcgtccagttcaagatcttcgcgaggtcaacaaacgcgtagaagacatccatccgactgtacctaatccttataatctgttatcaggcctgcccccatcgcaccaatggtatacagtattagacttgaaagacgcgttcttttgcctgcgtctgcacccaacgtctcagccgctgtttgcgttcgaatggcgtgatcctgaaatgggaatttcgggtcagttaacctggactcgtctgccccagggctttaaaaacagccccacattgttcgatgaagcacttcaccgtgacttagcagacttccgtatccaacacccagacttaattctgttacagtatgttgacgaccttttgttggcggcaacgtctgaacttgactgtcagcaaggcacacgcgcgttattacaaacgttaggtaacttaggatatcgtgcgtccgcgaaaaaggcgcaaatttgtcaaaaacaggtaaagtaccttgggtatttgctgaaagaaggtcaacgttggattactgatgcgcgtaaggagaccgtaatggggcagcctacgcctaagacgccacgcgaattgcgtgaatttttgggcaaagcgggattctgtcgtttatggattcctgggttcgctgaaatggctgcacccctgtaccccttaacaaaaacagggacgcttttcaactgggggccagaccagcaaaaggcgtatcaggagatcaaacaagctttgttgaccgcacccgcgttgggtcttccggatttaaccaagccctttgagctgttcgttgatgaaaaacagggatatgcaaaaggagtattaacccaaaagttaggcccgtggcgtcgccctgttgcttacttgagtaaaaaattggatcctgtcgcagcaggatggccaccgtgcttgcgtatggtcgcggcaattgccgttttgacaaaggatgcaggtaagttgacgatgggtcaacccttaaacatcttggctccacatgctgtagaagcgttagtaaagcagcccccagaccgctggctttctaatgcgcgcatgacccactatcaggcgcttctgcttgatacggatcgtgtacaatttggaccagttgtagctttgaatccagctactttgcttccccttccagaagaaggacttcagcacaattgtttagatattctggccgaggcacgtgggacgcgccctgatttgacggatcagccactgcctgatgccgaccatacatggtatactggcggcagtagtcttcttcaagaggggcaacgcaaggcgggagcagccgtcactacggagaccgaagttatctgggccaaagcgttacccgcgggaacatccgcgcaacgtgcacagttaatcgctctgacacaggccctgaagatggcagagggcaaaaagttgaatgtctacaccaactcacgttatgcttttgcaacagcgcattggcatggcgaaatttaccgccgccgtggtctgctgactagtgagggtaaggaaattaaaaataaagatgagattcttgcgttgttaaaagctttattcttaccaaaacgcctttcgatcattcattgcccggggcatcaaaagggtcactcagcggaggctcgtggaaaccgtatggcggaccaagctgcccgtaaggcggcgatcacagagaccccggatacatcaacgctgttgatcgaaaacagctctccctacactagcgagcatttttaa

SEQ ID NO: 150 - DNA, 2115 bp, synthetic construct
  source 1..2115: mol_type = other DNA
atgggcagcagccatcatcatcatcatcacagcagcggcctggtgccgcgcggcagccatatgactttaaatattgaggatgagcatcgtttacatgagacatcaaaagaacccgacgtgagcttagggtcaacgtggctttctgacttcccccaggcgtgggcggagactggcggaatggggttagctgtccgccaagcaccgttgatcatcccgttaaaggcaacgtctacacctgtctctatcaaacagtaccccatgagtcgtgaggcccgcctggggattaagccacatattcgtcgcttgtatgaccaggggatcttggtcccatgtcaatctccgtggaacaccccccttcgtcccgtgaaaaagccaggtacaaacgattatcgtccagttcaagatcttcgcgaggtcaacaaacgcgtagaagacatccatccgactgtacctaatccttataatctgttatcaggcctgcccccatcgcaccaatggtatacagtattagacttgaaagacgcgttcttttgcctgcgtctgcacccaacgtctcagccgctgtttgcgttcgaatggcgtgatcctgaaatgggaatttcgggtcagttaacctggactcgtctgccccagggctttaaaaacagccccacattgttcgatgaagcacttcaccgtgacttagcagacttccgtatccaacacccagacttaattctgttacagtatgttgacgaccttttgttggcggcaacgtctgaacttgactgtcagcaaggcacacgcgcgttattacaaacgttaggtaacttaggatatcgtgcgtccgcgaaaaaggcgcaaatttgtcaaaaacaggtaaagtaccttgggtatttgctgaaagaaggtcaacgttggattactgatgcgcgtaaggagaccgtaatggggcagcctacgcctaagacgccacgcgaattgcgtgaatttttgggcaaagcgggattctgtcgtttatggattcctgggttcgctgaaatggctgcacccctgtaccccttaacaaaaacagggacgcttttcaactgggggccagaccagcaaaaggcgtatcaggagatcaaacaagctttgttgaccgcacccgcgttgggtcttccggatttaaccaagccctttgagctgttcgttgatgaaaaacagggatatgcaaaaggagtattaacccaaaagttaggcccgtggcgtcgccctgttgcttacttgagtaaaaaattggatcctgtcgcagcaggatggccaccgtgcttgcgtatggtcgcggcaattgccgttttgacaaaggatgcaggtaagttgacgatgggtcaacccttaaacatcttggctccacatgctgtagaagcgttagtaaagcagcccccagaccgctggctttctaatgcgcgcatgacccactatcaggcgcttctgcttgatacggatcgtgtacaatttggaccagttgtagctttgaatccagctactttgcttccccttccagaagaaggacttcagcacaattgtttagatattctggccgaggcacatgggacgcgccctgatttgacggatcagccactgcctgatgccgaccatacatggtatactggcggcagtagtcttcttcaagaggggcaacgcaaggcgggagcagccgtcactacggagaccgaagttatctgggccaaagcgttacccgcgggaacatccgcgcaacgtgcacagttaatcgctctgacacaggccctgaagatggcagagggcaaaaagttgaatgtctacaccaactcacgttatgcttttgcaacagcgcattggcatggcgaaatttaccgccgccgtggtctgctgactagtgagggtaaggaaattaaaaataaagatgaggtacttgcgttgttaaaagctttattcttaccaaaacgcctttcgatcattcattgcccggggcatcaaaagggtcactcagcggaggctcgtggaaaccgtatggcggaccaagctgcccgtaaggcggcgatcacagagaccccggatacatcaacgctgttgatcgaaaacagctctccctacactagcgagcatttttaa

SEQ ID NO: 151 - DNA, 2115 bp, synthetic construct
  source 1..2115: mol_type = other DNA
atgggcagcagccatcatcatcatcatcacagcagcggcctggtgccgcgcggcagccatatgactttaaatattgaggatgagcatcgtttacatgagacatcaaaagaacccgacgtgagcttagggtcaacgtggctttctgacttcccccaggcgtgggcggagactggcggaatggggttagctgtccgccaagcaccgttgatcatcccgttaaaggcaacgtctacacctgtctctatcaaacagtaccccatgagtcgtgaggcccgcctggggattaagccacatattcgtcgcttgtatgaccaggggatcttggtcccatgtcaatctccgtggaacaccccccttcgtcccgtgaaaaagccaggtacaaacgattatcgtccagttcaagatcttcgcgaggtcaacaaacgcgtagaagacatccatccgactgtacctaatccttataatctgttatcaggcctgcccccatcgcaccaatggtatacagtattagacttgaaagacgcgttcttttgcctgcgtctgcacccaacgtctcagccgctgtttgcgttcgaatggcgtgatcctgaaatgggaatttcgggtcagttaacctggactcgtctgccccagggctttaaaaacagccccacattgttcgatgaagcacttcaccgtgacttagcagacttccgtatccaacacccagacttaattctgttacagtatgttgacgaccttttgttggcggcaacgtctgaacttgactgtcagcaaggcacacgcgcgttattacaaacgttaggtaacttaggatatcgtgcgtccgcgaaaaaggcgcaaatttgtcaaaaacaggtaaagtaccttgggtatttgctgaaagaaggtcaacgttggattactgatgcgcgtaaggagaccgtaatggggcagcctacgcctaagacgccacgcgaattgcgtgaatttttgggcaaagcgggattctgtcgtttatggattcctgggttcgctgaaatggctgcacccctgtaccccttaacaaaaacagggacgcttttcaactgggggccagaccagcaaaaggcgtatcaggagatcaaacaagctttgttgaccgcacccgcgttgggtcttccggatttaaccaagccctttgagctgttcgttgatgaaaaacagggatatgcaaaaggagtattaacccaaaagttaggcccgtggcgtcgccctgttgcttacttgagtaaaaaattggatcctgtcgcagcaggatggccaccgtgcttgcgtatggtcgcggcaattgccgttttgacaaaggatgcaggtaagttgacgatgggtcaacccttaaacatcttggctccacatgctgtagaagcgttagtaaagcagcccccagaccgctggctttctaatgcgcgcatgacccactatcaggcgcttctgcttgatacggatcgtgtacaatttggaccagttgtagctttgaatccagctactttgcttccccttccagaagaaggacttcagcacaattgtttagatattctggccgaggcacatgggacgcgccctgatttgacggatcagccactgcctgatgccgaccatacatggtatactggcggcagtagtcttcttcaagaggggcaacgcaaggcgggagcagccgtcactacggagaccgaagttatctgggcctgggcgttacccgcgggaacatccgcgcaacgtgcacagttaatcgctctgacacaggccctgaagatggcagagggcaaaaagttgaatgtctacaccaactcacgttatgcttttgcaacagcgcattggcatggcgaaatttaccgccgccgtggtctgctgactagtgagggtaaggaaattaaaaataaagatgagattcttgcgttgttaaaagctttattcttaccaaaacgcctttcgatcattcattgcccggggcatcaaaagggtcactcagcggaggctcgtggaaaccgtatggcggaccaagctgcccgtaaggcggcgatcacagagaccccggatacatcaacgctgttgatcgaaaacagctctccctacactagcgagcatttttaa

SEQ ID NO: 152 - DNA, 2115 bp, synthetic construct
  source 1..2115: mol_type = other DNA
atgggcagcagccatcatcatcatcatcacagcagcggcctggtgccgcgcggcagccatatgactttaaatattgaggatgagcatcgtttacatgagacatcaaaagaacccgacgtgagcttagggtcaacgtggctttctgacttcccccaggcgtgggcggagactggcggaatggggttagctgtccgccaagcaccgttgatcatcccgttaaaggcaacgtctacacctgtctctatcaaacagtaccccatgagtcgtgaggcccgcctggggattaagccacatattcgtcgcttgtatgaccaggggatcttggtcccatgtcaatctccgtggaacaccccccttcgtcccgtgaaaaagccaggtacaaacgattatcgtccagttcaagatcttcgcgaggtcaacaaacgcgtagaagacatccatccgactgtacctaatccttataatctggcgtcaggcctgcccccatcgcaccaatggtatacagtattagacttgaaagacgcgttcttttgcctgcgtctgcacccaacgtctcagccgctgtttgcgttcgaatggcgtgatcctgaaatgggaatttcgggtcagttaacctggactcgtctgccccagggctttaaaaacagccccacattgttcgatgaagcacttcaccgtgacttagcagacttccgtatccaacacccagacttaattctgttacagtatgttgacgaccttttgttggcggcaacgtctgaacttgactgtcagcaaggcacacgcgcgttattacaaacgttaggtaacttaggatatcgtgcgtccgcgaaaaaggcgcaaatttgtcaaaaacaggtaaagtaccttgggtatttgctgaaagaaggtcaacgttggattactgatgcgcgtaaggagaccgtaatggggcagcctacgcctaagacgccacgcgaattgcgtgaatttttgggcaaagcgggattctgtcgtttatggattcctgggttcgctgaaatggctgcacccctgtaccccttaacaaaaacagggacgcttttcaactgggggccagaccagcaaaaggcgtatcaggagatcaaacaagctttgttgaccgcacccgcgttgggtcttccggatttaaccaagccctttgagctgttcgttgatgaaaaacagggatatgcaaaaggagtattaacccaaaagttaggcccgtggcgtcgccctgttgcttacttgagtaaaaaattggatcctgtcgcagcaggatggccaccgtgcttgcgtatggtcgcggcaattgccgttttgacaaaggatgcaggtaagttgacgatgggtcaacccttaaacatcttggctccacatgctgtagaagcgttagtaaagcagcccccagaccgctggctttctaatgcgcgcatgacccactatcaggcgcttctgcttgatacggatcgtgtacaatttggaccagttgtagctttgaatccagctactttgcttccccttccagaagaaggacttcagcacaattgtttagatattctggccgaggcacatgggacgcgccctgatttgacggatcagccactgcctgatgccgaccatacatggtatactggcggcagtagtcttcttcaagaggggcaacgcaaggcgggagcagccgtcactacggagaccgaagttatctgggccaaagcgttacccgcgggaacatccgcgcaacgtgcacagttaatcgctctgacacaggccctgaagatggcagagggcaaaaagttgaatgtctacaccaactcacgttatgcttttgcaacagcgcattggcatggcgaaatttaccgccgccgtggtctgctgactagtgagggtaaggaaattaaaaataaagatgagattcttgcgttgttaaaagctttattcttaccaaaacgcctttcgatcattcattgcccggggcatcaaaagggtcactcagcggaggctcgtggaaaccgtatggcggaccaagctgcccgtaaggcggcgatcacagagaccccggatacatcaacgctgttgatcgaaaacagctctccctacactagcgagcatttttaa

SEQ ID NO: 153 - DNA, 2115 bp, synthetic construct
  source 1..2115: mol_type = other DNA
atgggcagcagccatcatcatcatcatcacagcagcggcctggtgccgcgcggcagccatatgactttaaatattgaggatgagcatcgtttacatgagacatcaaaagaacccgacgtgagcttagggtcaacgtggctttctgacttcccccaggcgtgggcggagactggcggaatggggttagctgtccgccaagcaccgttgatcatcccgttaaaggcaacgtctacacctgtctctatcaaacagtaccccatgagtcgtgaggcccgcctggggattaagccacatattcgtcgcttgtatgaccaggggatcttggtcccatgtcaatctccgtggaacaccccccttcgtcccgtgaaaaagccaggtacaaacgattatcgtccagttcaagatcttcgcgaggtcaacaaacgcgtagaagacatccatccgactgtacctaatccttataatctgttatcaggcctgcccccatcgcaccaatggtatacagtattagacttgaaagacgcgttcttttgcctgcgtctgcacccaacgtctcagccgctgtttgcgttcgaatggcgtgatcctgaaatgggaatttcgggtcagttaacctggactcgtctgccccagggctttaaaaacagccccacattgttcgatgaagcacttcaccgtgacttagcagacttccgtatccaacacccagacttaattctgttacagtatgttgacgaccttttgttggcggcaacgtctgaacttgactgtcagcaaggcacacgcgcgttattacaaacgttaggtaacttaggatatcgtgcgtccgcgaaaaaggcgcaaatttgtcaaaaacaggtaaagtaccttgggtatttgctgaaagaaggtcaacgttggattactgatgcgcgtaaggagaccgtaatggggcagcctacgcctaagacgccacgcgaattgcgtgaatttttgggcaaagcgggattctgtcgtttatggattcctgggttcgctgaaatggctgcacccctgtaccccttaacaaaaacagggacgcttttcaactgggggccagaccagcaaaaggcgtatcaggagatcaaacaagctttgttgaccgcacccgcgttgggtcttccggatttaaccaagccctttgagctgttcgttgatgaaaaacagggatatgcaaaaggagtattaacccaaaagttaggcccgtggcgtcgccctgttgcttacttgagtaaaaaattggatcctgtcgcagcaggatggccaccgtgcttgcgtatggtcgcggcaattgccgttttgacaaaggatgcaggtaagttgacgatgggtcaacccttaaacatccatgctccacatgctgtagaagcgttagtaaagcagcccccagaccgctggctttctaatgcgcgcatgacccactatcaggcgcttctgcttgatacggatcgtgtacaatttggaccagttgtagctttgaatccagctactttgcttccccttccagaagaaggacttcagcacaattgtttagatattctggccgaggcacatgggacgcgccctgatttgacggatcagccactgcctgatgccgaccatacatggtatactggcggcagtagtcttcttcaagaggggcaacgcaaggcgggagcagccgtcactacggagaccgaagttatctgggccaaagcgttacccgcgggaacatccgcgcaacgtgcacagttaatcgctctgacacaggccctgaagatggcagagggcaaaaagttgaatgtctacaccaactcacgttatgcttttgcaacagcgcattggcatggcgaaatttaccgccgccgtggtctgctgactagtgagggtaaggaaattaaaaataaagatgagattcttgcgttgttaaaagctttattcttaccaaaacgcctttcgatcattcattgcccggggcatcaaaagggtcactcagcggaggctcgtggaaaccgtatggcggaccaagctgcccgtaaggcggcgatcacagagaccccggatacatcaacgctgttgatcgaaaacagctctccctacactagcgagcatttttaa

SEQ ID NO: 154 - DNA, 2115 bp, synthetic construct
  source 1..2115: mol_type = other DNA
atgggcagcagccatcatcatcatcatcacagcagcggcctggtgccgcgcggcagccatatgactttaaatattgaggatgagcatcgtttacatgagacatcaaaagaacccgacgtgagcttagggtcaacgtggctttctgacttcccccaggcgtgggcggagactggcggaatggggttagctgtccgccaagcaccgttgatcatcccgttaaaggcaacgtctacacctgtctctatcaaacagtaccccatgagtcgtgaggcccgcctggggattaagccacatattcgtcgcttgtatgaccaggggatcttggtcccatgtcaatctccgtggaacaccccccttcgtcccgtgaaaaagccaggtacaaacgattatcgtccagttcaagatcttcgcgaggtcaacaaacgcgtagaagacatccatccgactgtacctaatccttataatctgttatcaggcctgcccccatcgcaccaatggtatacagtattagacttgaaagacgcgttcttttgcctgcgtctgcacccaacgtctcagccgctgtttgcgttcgaatggcgtgatcctgaaatgggaatttcgggtcagttaacctggactcgtctgccccagggctttaaaaacagccccacattgttcgatgaagcacttcaccgtgacttagcagacttccgtatccaacacccagacttaattctgttacagtatgttgacgaccttttgttggcggcaacgtctgaacttgactgtcagcaaggcacacgcgcgttattacaaacgttaggtaacttaggatatcgtgcgtccgcgaaaaaggcgcaaatttgtcaaaaacaggtaaagtaccttgggtatttgctgaaagaaggtcaacgttggattactgatgcgcgtaaggagaccgtaatggggcagcctacgcctaagacgccacgcgaattgcgtgaatttttgggcaaagcgggattctgtcgtttatggattcctgggttcgctgaaatggctgcacccctgtaccccttaacaaaaacagggacgcttttcaactgggggccagaccagcaaaaggcgtatcaggagatcaaacaagctttgttgaccgcacccgcgttgggtcttccggatttaaccaagccctttgagctgttcgttgatgaaaaacagggatatgcaaaaggagtattaacccaaaagttaggcccgtggcgtcgccctgttgcttacttgagtaaaaaattggatcctgtcgcagcaggatggccaccgtgcttgcgtatggtcgcggcaattgccgttttgacaaaggatgcaggtaagttgacgatgggtcaacccttaaacatcttggctccacatgctgtagaagcgttagtaaagcagcccccagaccgctggctttctaatgcgcgcatgacccactatcaggcgcttctgcttgatacggatcgtgtacaatttggaccagttgtagctttgaatccagctactttgcttccccttccagaagaaggaacacagcacaattgtttagatattctggccgaggcacatgggacgcgccctgatttgacggatcagccactgcctgatgccgaccatacatggtatactggcggcagtagtcttcttcaagaggggcaacgcaaggcgggagcagccgtcactacggagaccgaagttatctgggccaaagcgttacccgcgggaacatccgcgcaacgtgcacagttaatcgctctgacacaggccctgaagatggcagagggcaaaaagttgaatgtctacaccaactcacgttatgcttttgcaacagcgcattggcatggcgaaatttaccgccgccgtggtctgctgactagtgagggtaaggaaattaaaaataaagatgagattcttgcgttgttaaaagctttattcttaccaaaacgcctttcgatcattcattgcccggggcatcaaaagggtcactcagcggaggctcgtggaaaccgtatggcggaccaagctgcccgtaaggcggcgatcacagagaccccggatacatcaacgctgttgatcgaaaacagctctccctacactagcgagcatttttaa

SEQ ID NO: 155 - DNA, 2115 bp, synthetic construct
  source 1..2115: mol_type = other DNA
atgggcagcagccatcatcatcatcatcacagcagcggcctggtgccgcgcggcagccatatgactttaaatattgaggatgagcatcgtttacatgagacatcaaaagaacccgacgtgagcttagggtcaacgtggctttctgacttcccccaggcgtgggcggagactggcggaatggggttagctgtccgccaagcaccgttgatcatcccgttaaaggcaacgtctacacctgtctctatcaaacagtaccccatgagtcgtgaggcccgcctggggattaagccacatattcgtcgcttgtatgaccaggggatcttggtcccatgtcaatctccgtggaacaccccccttcgtcccgtgaaaaagccaggtacaaacgattatcgtccagttcaagatcttcgcgaggtcaacaaacgcgtagaagacatccatccgactgtacctaatccttataatctgttatcaggcctgcccccatcgcaccaatggtatacagtattagacttgaaagacgcgttcttttgcctgcgtctgcacccaacgtctcagccgctgtttgcgttcgaatggcgtgatcctgaaatgggaatttcgggtcagttaacctggactcgtctgccccagggctttaaaaacagccccacattgttcgatgaagcacttcaccgtgacttagcagacttccgtatccaacacccagacttaattctgttacagtatgttgacgaccttttgttggcggcaacgtctgaacttgactgtcagcaaggcacacgcgcgttattacaaacgttaggtaacttaggatatcgtgcgtccgcgaaaaaggcgcaaatttgtcaaaaacaggtaaagtaccttgggtatttgctgaaagaaggtcaacgttggattactgatgcgcgtaaggagaccgtaatggggcagcctacgcctaagacgccacgcgaattgcgtgaatttttgggcaaagcgggattctgtcgtttatggattcctgggttcgctgaaatggctgcacccctgtaccccttaacaaaaacagggacgcttttcaactgggggccagaccagcaaaaggcgtatcaggagatcaaacaagctttgttgaccgcacccgcgttgggtcttccggatttaaccaagccctttgagctgttcgttgatgaaaaacagggatatgcaaaaggagtattaacccaaaagttaggcccgtggcgtcgccctgttgcttacttgagtaaaaaattggatcctgtcgcagcaggatggccaccgtgcttgcgtatggtcgcggcaattgccgttttgacaaaggatgcaggtaagttgacgatgggtcaacccttaaacatcttggctccacatgctgtagaagcgttagtaaagcagcccccagaccgctggctttctaatgcgcgcatgacccactatcaggcgcttctgcttgatacggatcgtgtacaatttggaccagttgtagctttgaatccagctactttgcttccccttccagaagaaggacttcagcacaattgtttagatattctggccgaggcacatgggacgcgccctgatttgacggatcagccactgcctgatgccgaccatacatggtatactggcggcagtagtgtacttcaagaggggcaacgcaaggcgggagcagccgtcactacggagaccgaagttatctgggccaaagcgttacccgcgggaacatccgcgcaacgtgcacagttaatcgctctgacacaggccctgaagatggcagagggcaaaaagttgaatgtctacaccaactcacgttatgcttttgcaacagcgcattggcatggcgaaatttaccgccgccgtggtctgctgactagtgagggtaaggaaattaaaaataaagatgagattcttgcgttgttaaaagctttattcttaccaaaacgcctttcgatcattcattgcccggggcatcaaaagggtcactcagcggaggctcgtggaaaccgtatggcggaccaagctgcccgtaaggcggcgatcacagagaccccggatacatcaacgctgttgatcgaaaacagctctccctacactagcgagcatttttaa

SEQ ID NO: 156 - DNA, 2115 bp, synthetic construct
  source 1..2115: mol_type = other DNA
atgggcagcagccatcatcatcatcatcacagcagcggcctggtgccgcgcggcagccatatgactttaaatattgaggatgagcatcgtttacatgagacatcaaaagaacccgacgtgagcttagggtcaacgtggctttctgacttcccccaggcgtgggcggagactggcggaatggggttagctgtccgccaagcaccgttgatcatcccgttaaaggcaacgtctacacctgtctctatcaaacagtaccccatgagtcgtgaggcccgcctggggattaagccacatattcgtcgcttgtatgaccaggggatcttggtcccatgtcaatctccgtggaacaccccccttcgtcccgtgaaaaagccaggtacaaacgattatcgtccagttcaagatcttcgcgaggtcaacaaacgcgtagaagacatccatccgactgtacctaatccttataatctgttatcaggcctgcccccatcgcaccaatggtatacagtattagacttgaaagacgcgttcttttgcctgcgtctgcacccaacgtctcagccgctgtttgcgttcgaatggcgtgatcctgaaatgggaatttcgggtcagttaacctggactcgtctgccccagggctttaaaaacagccccacattgttcgatgaagcacttcaccgtgacttagcagacttccgtatccaacacccagacttaattctgttacagtatgttgacgaccttttgttggcggcaacgtctgaacttgactgtcagcaaggcacacgcgcgttattacaaacgttaggtaacttaggatatcgtgcgtccgcgaaaaaggcgcaaatttgtcaaaaacaggtaaagtaccttgggtatttgctgaaagaaggtcaacgttggattactgatgcgcgtaaggagaccgtaatggggcagcctacgcctaagacgccacgcgaattgcgtgaatttttgggcaaagcgggattctgtcgtttatggattcctgggttcgctgaaatggctgcacccctgtaccccttaacaaaaacagggacgcttttcaactgggggccagaccagcaaaaggcgtatcaggagatcaaacaagctttgttgaccgcacccgcgttgggtcttccggatttaaccaagccctttgagctgttcgttgatgaaaaacagggatatgcaaaaggagtattaacccaaaagttaggcccgtggcgtcgccctgttgcttacttgagtaaaaaattggatcctgtcgcagcaggatggccaccgtgcttgcgtatggtcgcggcaattgccgttttgacaaaggatgcaggtaagttgacgatgggtcaacccttaaacatcttggctccacatgctgtagaagcgttagtaaagcagcccccagaccgctggctttctaatgcgcgcatgacccactatcaggcgcttctgcttgatacggatcgtgtacaatttggaccagttgtagctttgaatccagctactttgcttccccttccagaagaaggacttcagcacaattgtttagatattctggccgaggcacatgggacgcgccctgatttgacggatcagccactgcctgatgccgaccatacatggtatactggcggcagtagttatcttcaagaggggcaacgcaaggcgggagcagccgtcactacggagaccgaagttatctgggccaaagcgttacccgcgggaacatccgcgcaacgtgcacagttaatcgctctgacacaggccctgaagatggcagagggcaaaaagttgaatgtctacaccaactcacgttatgcttttgcaacagcgcattggcatggcgaaatttaccgccgccgtggtctgctgactagtgagggtaaggaaattaaaaataaagatgagattcttgcgttgttaaaagctttattcttaccaaaacgcctttcgatcattcattgcccggggcatcaaaagggtcactcagcggaggctcgtggaaaccgtatggcggaccaagctgcccgtaaggcggcgatcacagagaccccggatacatcaacgctgttgatcgaaaacagctctccctacactagcgagcatttttaa

SEQ ID NO: 157 - DNA, 2115 bp, synthetic construct
  source 1..2115: mol_type = other DNA
atgggcagcagccatcatcatcatcatcacagcagcggcctggtgccgcgcggcagccatatgactttaaatattgaggatgagcatcgtttacatgagacatcaaaagaacccgacgtgagcttagggtcaacgtggctttctgacttcccccaggcgtgggcggagactggcggaatggggttagctgtccgccaagcaccgttgatcatcccgttaaaggcaacgtctacacctgtctctatcaaacagtaccccatgagtcgtgaggcccgcctggggattaagccacatattcgtcgcttgtatgaccaggggatcttggtcccatgtcaatctccgtggaacaccccccttcgtcccgtgaaaaagccaggtacaaacgattatcgtccagttcaagatcttcgcgaggtcaacaaacgcgtagaagacatccatccgactgtacctaatccttataatctgttatcaggcctgcccccatcgcaccaatggtatacagtattagacttgaaagacgcgttcttttgcctgcgtctgcacccaacgtctcagccgctgtttgcgttcgaatggcgtgatcctgaaatgggaatttcgggtcagttaacctggactcgtctgccccagggctttaaaaacagccccacattgttcgatgaagcacttcaccgtgacttagcagacttccgtatccaacacccagacttaattctgttacagtatgttgacgaccttttgttggcggcaacgtctgaacttgactgtcagcaaggcacacgcgcgttattacaaacgttaggtaacttaggatatcgtgcgtccgcgaaaaaggcgcaaatttgtcaaaaacaggtaaagtaccttgggtatttgctgaaagaaggtcaacgttggattactgatgcgcgtaaggagaccgtaatggggcagcctacgcctaagacgccacgcgaattgcgtgaatttttgggcaaagcgggattctgtcgtttatggattcctgggttcgctgaaatggctgcacccctgtaccccttaacaaaaacagggacgcttttcaactgggggccagaccagcaaaaggcgtatcaggagatcaaacaagctttgttgaccgcacccgcgttgggtcttccggatttaaccaagccctttgagctgttcgttgatgaaaaacagggatatgcaaaaggagtattaacccaaaagttaggcccgtggcgtcgccctgttgcttacttgagtaaaaaattggatcctgtcgcagcaggatggccaccgtgcttgcgtatggtcgcggcaattgccgttttgacaaaggatgcaggtaagttgacgatgggtcaacccttaaacatcttggctccacatgctgtagaagcgttagtaaagcagcccccagaccgctggctttctaatgcgcgcatgacccactatcaggcgcttctgcttgatacggatcgtgtacaatttggaccagttgtagctttgaatccagctactttgcttccccttccagaagaaggacttcagcacaattgtttagatattctggccgaggcacatgggacgcgccctgatttgacggatcagccactgcctgatgccgaccatacatggtatactggcggcagtagtcttcttcaagaggggcaacgcaaggcgggagcagccgtcactacggagaccgaagttatctgggccaaagcgttacccgcgggaacatccgcgcaacgtgcacagttaatcgctctgacacaggccctgaagatggcagagggcaaaaagttgaatgtctacaccaactcacgttatgcttttgcaacagcgcattggcatggcgaaatttaccgccgccgtggtctggggactagtgagggtaaggaaattaaaaataaagatgagattcttgcgttgttaaaagctttattcttaccaaaacgcctttcgatcattcattgcccggggcatcaaaagggtcactcagcggaggctcgtggaaaccgtatggcggaccaagctgcccgtaaggcggcgatcacagagaccccggatacatcaacgctgttgatcgaaaacagctctccctacactagcgagcatttttaa

SEQ ID NO: 158 - DNA, 2115 bp, synthetic construct
  source 1..2115: mol_type = other DNA
atgggcagcagccatcatcatcatcatcacagcagcggcctggtgccgcgcggcagccatatgactttaaatattgaggatgagcatcgtttacatgagacatcaaaagaacccgacgtgagcttagggtcaacgtggctttctgacttcccccaggcgtgggcggagactggcggaatggggttagctgtccgccaagcaccgttgatcatcccgttaaaggcaacgtctacacctgtctctatcaaacagtaccccatgagtcgtgaggcccgcctggggattaagccacatattcgtcgcttgtatgaccaggggatcttggtcccatgtcaatctccgtggaacaccccccttcgtcccgtgaaaaagccaggtacaaacgattatcgtccagttcaagatcttcgcgaggtcaacaaacgcgtagaagacatccatccgactgtacctaatccttataatctgttatcaggcctgcccccatcgcaccaatggtatacagtattagacttgaaagacgcgttcttttgcctgcgtctgcacccaacgtctcagccgctgtttgcgttcgaatggcgtgatcctgaaatgggaatttcgggtcagttaacctggactcgtctgccccagggctttaaaaacagccccacattgttcgatgaagcacttcaccgtgacttagcagacttccgtatccaacacccagacttaattctgttacagtatgttgacgaccttttgttggcggcaacgtctgaacttgactgtcagcaaggcacacgcgcgttattacaaacgttaggtaacttaggatatcgtgcgtccgcgaaaaaggcgcaaatttgtcaaaaacaggtaaagtaccttgggtatttgctgaaagaaggtcaacgttggattactgatgcgcgtaaggagaccgtaatggggcagcctacgcctaagacgccacgcgaattgcgtgaatttttgggcaaagcgggattctgtcgtttatggattcctgggttcgctgaaatggctgcacccctgtaccccttaacaaaaacagggacgcttttcaactgggggccagaccagcaaaaggcgtatcaggagatcaaacaagctttgttgaccgcacccgcgttgggtcttccggatttaaccaagccctttgagctgttcgttgatgaaaaacagggatatgcaaaaggagtattaacccaaaagttaggcccgtggcgtcgccctgttgcttacttgagtaaaaaattggatcctgtcgcagcaggatggccaccgtgcttgcgtatggtcgcggcaattgccgttttgacaaaggatgcaggtaagttgacgatgggtcaacccttaacaatcttggctccacatgctgtagaagcgttagtaaagcagcccccagaccgctggctttctaatgcgcgcatgacccactatcaggcgcttctgcttgatacggatcgtgtacaatttggaccagttgtagctttgaatccagctactttgcttccccttccagaagaaggacttcagcacaattgtttagatattctggccgaggcacatgggacgcgccctgatttgacggatcagccactgcctgatgccgaccatacatggtatactggcggcagtagtcttcttcaagaggggcaacgcaaggcgggagcagccgtcactacggagaccgaagttatctgggccaaagcgttacccgcgggaacatccgcgcaacgtgcacagttaatcgctctgacacaggccctgaagatggcagagggcaaaaagttgaatgtctacaccaactcacgttatgcttttgcaacagcgcattggcatggcgaaatttaccgccgccgtggtctgctgactagtgagggtaaggaaattaaaaataaagatgagattcttgcgttgttaaaagctttattcttaccaaaacgcctttcgatcattcattgcccggggcatcaaaagggtcactcagcggaggctcgtggaaaccgtatggcggaccaagctgcccgtaaggcggcgatcacagagaccccggatacatcaacgctgttgatcgaaaacagctctccctacactagcgagcatttttaa

SEQ ID NO: 159 - DNA, 2115 bp, synthetic construct
  source 1..2115: mol_type = other DNA
atgggcagcagccatcatcatcatcatcacagcagcggcctggtgccgcgcggcagccatatgactttaaatattgaggatgagcatcgtttacatgagacatcaaaagaacccgacgtgagcttagggtcaacgtggctttctgacttcccccaggcgtgggcggagactggcggaatggggttagctgtccgccaagcaccgttgatcatcccgttaaaggcaacgtctacacctgtctctatcaaacagtaccccatgagtcgtgaggcccgcctggggattaagccacatattcgtcgcttgtatgaccaggggatcttggtcccatgtcaatctccgtggaacaccccccttcgtcccgtgaaaaagccaggtacaaacgattatcgtccagttcaagatcttcgcgaggtcaacaaacgcgtagaagacatccatccgactgtacctaatccttataatctgttatcaggcctgcccccatcgcaccaatggtatacagtattagacttgaaagacgcgttcttttgcctgcgtctgcacccaacgtctcagccgctgtttgcgttcgaatggcgtgatcctgaaatgggaatttcgggtcagttaacctggactcgtctgccccagggctttaaaaacagcgcgacattgttcgatgaagcacttcaccgtgacttagcagacttccgtatccaacacccagacttaattctgttacagtatgttgacgaccttttgttggcggcaacgtctgaacttgactgtcagcaaggcacacgcgcgttattacaaacgttaggtaacttaggatatcgtgcgtccgcgaaaaaggcgcaaatttgtcaaaaacaggtaaagtaccttgggtatttgctgaaagaaggtcaacgttggattactgatgcgcgtaaggagaccgtaatggggcagcctacgcctaagacgccacgcgaattgcgtgaatttttgggcaaagcgggattctgtcgtttatggattcctgggttcgctgaaatggctgcacccctgtaccccttaacaaaaacagggacgcttttcaactgggggccagaccagcaaaaggcgtatcaggagatcaaacaagctttgttgaccgcacccgcgttgggtcttccggatttaaccaagccctttgagctgttcgttgatgaaaaacagggatatgcaaaaggagtattaacccaaaagttaggcccgtggcgtcgccctgttgcttacttgagtaaaaaattggatcctgtcgcagcaggatggccaccgtgcttgcgtatggtcgcggcaattgccgttttgacaaaggatgcaggtaagttgacgatgggtcaacccttaaacatcttggctccacatgctgtagaagcgttagtaaagcagcccccagaccgctggctttctaatgcgcgcatgacccactatcaggcgcttctgcttgatacggatcgtgtacaatttggaccagttgtagctttgaatccagctactttgcttccccttccagaagaaggacttcagcacaattgtttagatattctggccgaggcacatgggacgcgccctgatttgacggatcagccactgcctgatgccgaccatacatggtatactggcggcagtagtcttcttcaagaggggcaacgcaaggcgggagcagccgtcactacggagaccgaagttatctgggccaaagcgttacccgcgggaacatccgcgcaacgtgcacagttaatcgctctgacacaggccctgaagatggcagagggcaaaaagttgaatgtctacaccaactcacgttatgcttttgcaacagcgcattggcatggcgaaatttaccgccgccgtggtctgctgactagtgagggtaaggaaattaaaaataaagatgagattcttgcgttgttaaaagctttattcttaccaaaacgcctttcgatcattcattgcccggggcatcaaaagggtcactcagcggaggctcgtggaaaccgtatggcggaccaagctgcccgtaaggcggcgatcacagagaccccggatacatcaacgctgttgatcgaaaacagctctccctacactagcgagcatttttaa

SEQ ID NO: 160 - DNA, 2115 bp, synthetic construct
  source 1..2115: mol_type = other DNA
atgggcagcagccatcatcatcatcatcacagcagcggcctggtgccgcgcggcagccatatgactttaaatattgaggatgagcatcgtttacatgagacatcaaaagaacccgacgtgagcttagggtcaacgtggctttctgacttcccccaggcgtgggcggagactggcggaatggggttagctgtccgccaagcaccgttgatcatcccgttaaaggcaacgtctacacctgtctctatcaaacagtaccccatgagtcgtgaggcccgcctggggattaagccacatattcgtcgcttgtatgaccaggggatcttggtcccatgtcaatctccgtggaacaccccccttcgtcccgtgaaaaagccaggtacaaacgattatcgtccagttcaagatcttcgcgaggtcaacaaacgcgtagaagacatccatccgactgtacctaatccttataatctgttatcaggcctgcccccatcgcaccaatggtatacagtattagacttgaaagacgcgttcttttgcctgcgtctgcacccaacgtctcagccgctgtttgcgttcgaatggcgtgatcctgaaatgggaatttcgggtcagttaacctggactcgtctgccccagggctttaaaaacagccatacattgttcgatgaagcacttcaccgtgacttagcagacttccgtatccaacacccagacttaattctgttacagtatgttgacgaccttttgttggcggcaacgtctgaacttgactgtcagcaaggcacacgcgcgttattacaaacgttaggtaacttaggatatcgtgcgtccgcgaaaaaggcgcaaatttgtcaaaaacaggtaaagtaccttgggtatttgctgaaagaaggtcaacgttggattactgatgcgcgtaaggagaccgtaatggggcagcctacgcctaagacgccacgcgaattgcgtgaatttttgggcaaagcgggattctgtcgtttatggattcctgggttcgctgaaatggctgcacccctgtaccccttaacaaaaacagggacgcttttcaactgggggccagaccagcaaaaggcgtatcaggagatcaaacaagctttgttgaccgcacccgcgttgggtcttccggatttaaccaagccctttgagctgttcgttgatgaaaaacagggatatgcaaaaggagtattaacccaaaagttaggcccgtggcgtcgccctgttgcttacttgagtaaaaaattggatcctgtcgcagcaggatggccaccgtgcttgcgtatggtcgcggcaattgccgttttgacaaaggatgcaggtaagttgacgatgggtcaacccttaaacatcttggctccacatgctgtagaagcgttagtaaagcagcccccagaccgctggctttctaatgcgcgcatgacccactatcaggcgcttctgcttgatacggatcgtgtacaatttggaccagttgtagctttgaatccagctactttgcttccccttccagaagaaggacttcagcacaattgtttagatattctggccgaggcacatgggacgcgccctgatttgacggatcagccactgcctgatgccgaccatacatggtatactggcggcagtagtcttcttcaagaggggcaacgcaaggcgggagcagccgtcactacggagaccgaagttatctgggccaaagcgttacccgcgggaacatccgcgcaacgtgcacagttaatcgctctgacacaggccctgaagatggcagagggcaaaaagttgaatgtctacaccaactcacgttatgcttttgcaacagcgcattggcatggcgaaatttaccgccgccgtggtctgctgactagtgagggtaaggaaattaaaaataaagatgagattcttgcgttgttaaaagctttattcttaccaaaacgcctttcgatcattcattgcccggggcatcaaaagggtcactcagcggaggctcgtggaaaccgtatggcggaccaagctgcccgtaaggcggcgatcacagagaccccggatacatcaacgctgttgatcgaaaacagctctccctacactagcgagcatttttaa

SEQ ID NO: 161 - DNA, 2115 bp, synthetic construct
  source 1..2115: mol_type = other DNA
atgggcagcagccatcatcatcatcatcacagcagcggcctggtgccgcgcggcagccatatgactttaaatattgaggatgagcatcgtttacatgagacatcaaaagaacccgacgtgagcttagggtcaacgtggctttctgacttcccccaggcgtgggcggagactggcggaatggggttagctgtccgccaagcaccgttgatcatcccgttaaaggcaacgtctacacctgtctctatcaaacagtaccccatgagtcgtgaggcccgcctggggattaagccacatattcgtcgcttgtatgaccaggggatcttggtcccatgtcaatctccgtggaacaccccccttcgtcccgtgaaaaagccaggtacaaacgattatcgtccagttcaagatcttcgcgaggtcaacaaacgcgtagaagacatccatccgactgtacctaatccttataatctgttatcaggcctgcccccatcgcaccaatggtatacagtattagacttgaaagacgcgttcttttgcctgcgtctgcacccaacgtctcagccgctgtttgcgttcgaatggcgtgatcctgaaatgggaatttcgggtcagttaacctggactcgtctgccccagggctttaaaaacagcttaacattgttcgatgaagcacttcaccgtgacttagcagacttccgtatccaacacccagacttaattctgttacagtatgttgacgaccttttgttggcggcaacgtctgaacttgactgtcagcaaggcacacgcgcgttattacaaacgttaggtaacttaggatatcgtgcgtccgcgaaaaaggcgcaaatttgtcaaaaacaggtaaagtaccttgggtatttgctgaaagaaggtcaacgttggattactgatgcgcgtaaggagaccgtaatggggcagcctacgcctaagacgccacgcgaattgcgtgaatttttgggcaaagcgggattctgtcgtttatggattcctgggttcgctgaaatggctgcacccctgtaccccttaacaaaaacagggacgcttttcaactgggggccagaccagcaaaaggcgtatcaggagatcaaacaagctttgttgaccgcacccgcgttgggtcttccggatttaaccaagccctttgagctgttcgttgatgaaaaacagggatatgcaaaaggagtattaacccaaaagttaggcccgtggcgtcgccctgttgcttacttgagtaaaaaattggatcctgtcgcagcaggatggccaccgtgcttgcgtatggtcgcggcaattgccgttttgacaaaggatgcaggtaagttgacgatgggtcaacccttaaacatcttggctccacatgctgtagaagcgttagtaaagcagcccccagaccgctggctttctaatgcgcgcatgacccactatcaggcgcttctgcttgatacggatcgtgtacaatttggaccagttgtagctttgaatccagctactttgcttccccttccagaagaaggacttcagcacaattgtttagatattctggccgaggcacatgggacgcgccctgatttgacggatcagccactgcctgatgccgaccatacatggtatactggcggcagtagtcttcttcaagaggggcaacgcaaggcgggagcagccgtcactacggagaccgaagttatctgggccaaagcgttacccgcgggaacatccgcgcaacgtgcacagttaatcgctctgacacaggccctgaagatggcagagggcaaaaagttgaatgtctacaccaactcacgttatgcttttgcaacagcgcattggcatggcgaaatttaccgccgccgtggtctgctgactagtgagggtaaggaaattaaaaataaagatgagattcttgcgttgttaaaagctttattcttaccaaaacgcctttcgatcattcattgcccggggcatcaaaagggtcactcagcggaggctcgtggaaaccgtatggcggaccaagctgcccgtaaggcggcgatcacagagaccccggatacatcaacgctgttgatcgaaaacagctctccctacactagcgagcatttttaa

SEQ ID NO: 162 - DNA, 2115 bp, synthetic construct
  source 1..2115: mol_type = other DNA
atgggcagcagccatcatcatcatcatcacagcagcggcctggtgccgcgcggcagccatatgactttaaatattgaggatgagcatcgtttacatgagacatcaaaagaacccgacgtgagcttagggtcaacgtggctttctgacttcccccaggcgtgggcggagactggcggaatggggttagctgtccgccaagcaccgttgatcatcccgttaaaggcaacgtctacacctgtctctatcaaacagtaccccatgagtcgtgaggcccgcctggggattaagccacatattcgtcgcttgtatgaccaggggatcttggtcccatgtcaatctccgtggaacaccccccttcgtcccgtgaaaaagccaggtacaaacgattatcgtccagttcaagatcttcgcgaggtcaacaaacgcgtagaagacatccatccgactgtacctaatccttataatctgttatcaggcctgcccccatcgcaccaatggtatacagtattagacttgaaagacgcgttcttttgcctgcgtctgcacccaacgtctcagccgctgtttgcgttcgaatggcgtgatcctgaaatgggaatttcgggtcagttaacctggactcgtctgccccagggctttaaaaacagccccacattgttcgatgaagcacttcaccgtgacttagcagacttccgtatccaacacccagacttaattctgttacagtatgttgacgaccttttgttggcggcaacgtctgaacttgactgtcagcaaggcacacgcgcgttattacaaacgttaggtaacttaggatatcgtgcgtccgcgaaaaaggcgcaaatttgtcaaaaacaggtaaagtaccttgggtatttgctgaaagaaggtcaacgttggattactgatgcgcgtaaggagaccgtaatggggcagcctacgcctaagacgccacgcgaattgcgtgaatttttgggcaaagcgggattctgtcgtttatggattcctgggttcgctgaaatggctgcacccctgtaccccttaacaaaaacagggacgcttttcaactgggggccagaccagcaaaaggcgtatcaggagatcaaacaagctttgttgaccgcacccgcgttgggtcttccggatttaaccaagccctttgagctgttcgttgatgaaaaacagggatatgcaaaaggagtattaacccaaaagttaggcccgtggcgtcgccctgttgcttacttgagtaaaaaattggatttagtcgcagcaggatggccaccgtgcttgcgtatggtcgcggcaattgccgttttgacaaaggatgcaggtaagttgacgatgggtcaacccttaaacatcttggctccacatgctgtagaagcgttagtaaagcagcccccagaccgctggctttctaatgcgcgcatgacccactatcaggcgcttctgcttgatacggatcgtgtacaatttggaccagttgtagctttgaatccagctactttgcttccccttccagaagaaggacttcagcacaattgtttagatattctggccgaggcacatgggacgcgccctgatttgacggatcagccactgcctgatgccgaccatacatggtatactggcggcagtagtcttcttcaagaggggcaacgcaaggcgggagcagccgtcactacggagaccgaagttatctgggccaaagcgttacccgcgggaacatccgcgcaacgtgcacagttaatcgctctgacacaggccctgaagatggcagagggcaaaaagttgaatgtctacaccaactcacgttatgcttttgcaacagcgcattggcatggcgaaatttaccgccgccgtggtctgctgactagtgagggtaaggaaattaaaaataaagatgagattcttgcgttgttaaaagctttattcttaccaaaacgcctttcgatcattcattgcccggggcatcaaaagggtcactcagcggaggctcgtggaaaccgtatggcggaccaagctgcccgtaaggcggcgatcacagagaccccggatacatcaacgctgttgatcgaaaacagctctccctacactagcgagcatttttaa

SEQ ID NO: 163 - DNA, 2115 bp, synthetic construct
  source 1..2115: mol_type = other DNA
atgggcagcagccatcatcatcatcatcacagcagcggcctggtgccgcgcggcagccatatgactttaaatattgaggatgagcatcgtttacatgagacatcaaaagaacccgacgtgagcttagggtcaacgtggctttctgacttcccccaggcgtgggcggagactggcggaatggggttagctgtccgccaagcaccgttgatcatcccgttaaaggcaacgtctacacctgtctctatcaaacagtaccccatgagtcgtgaggcccgcctggggattaagccacatattcgtcgcttgtatgaccaggggatcttggtcccatgtcaatctccgtggaacaccccccttcgtcccgtgaaaaagccaggtacaaacgattatcgtccagttcaagatcttcgcgaggtcaacaaacgcgtagaagacatccatccgactgtacctaatccttataatctgttatcaggcctgcccccatcgcaccaatggtatacagtattagacttgaaagacgcgttcttttgcctgcgtctgcacccaacgtctcagccgctgtttgcgttcgaatggcgtgatcctgaaatgggaatttcgggtcagttaacctggactcgtctgccccagggctttaaaaacagccccacattgttcgatgaagcacttcaccgtgacttagcagacttccgtatccaacacccagacttaattctgttacagtatgttgacgaccttttgttggcggcaacgtctgaacttgactgtcagcaaggcacacgcgcgttattacaaacgttaggtaacttaggatatcgtgcgtccgcgaaaaaggcgcaaatttgtcaaaaacaggtaaagtaccttgggtatttgctgaaagaaggtcaacgttggattactgatgcgcgtaaggagaccgtaatggggcagcctacgcctaagacgccacgcgaattgcgtgaatttttgggcaaagcgggattctgtcgtttatggattcctgggttcgctgaaatggctgcacccctgtaccccttaacaaaaacagggacgcttttcaactgggggccagaccagcaaaaggcgtatcaggagatcaaacaagctttgttgaccgcacccgcgttgggtcttccggatttaaccaagccctttgagctgttcgttgatgaaaaattaggatatgcaaaaggagtattaacccaaaagttaggcccgtggcgtcgccctgttgcttacttgagtaaaaaattggatcctgtcgcagcaggatggccaccgtgcttgcgtatggtcgcggcaattgccgttttgacaaaggatgcaggtaagttgacgatgggtcaacccttaaacatcttggctccacatgctgtagaagcgttagtaaagcagcccccagaccgctggctttctaatgcgcgcatgacccactatcaggcgcttctgcttgatacggatcgtgtacaatttggaccagttgtagctttgaatccagctactttgcttccccttccagaagaaggacttcagcacaattgtttagatattctggccgaggcacatgggacgcgccctgatttgacggatcagccactgcctgatgccgaccatacatggtatactggcggcagtagtcttcttcaagaggggcaacgcaaggcgggagcagccgtcactacggagaccgaagttatctgggccaaagcgttacccgcgggaacatccgcgcaacgtgcacagttaatcgctctgacacaggccctgaagatggcagagggcaaaaagttgaatgtctacaccaactcacgttatgcttttgcaacagcgcattggcatggcgaaatttaccgccgccgtggtctgctgactagtgagggtaaggaaattaaaaataaagatgagattcttgcgttgttaaaagctttattcttaccaaaacgcctttcgatcattcattgcccggggcatcaaaagggtcactcagcggaggctcgtggaaaccgtatggcggaccaagctgcccgtaaggcggcgatcacagagaccccggatacatcaacgctgttgatcgaaaacagctctccctacactagcgagcatttttaa

SEQ ID NO: 164 - DNA, 2115 bp, synthetic construct
  source 1..2115: mol_type = other DNA
atgggcagcagccatcatcatcatcatcacagcagcggcctggtgccgcgcggcagccatatgactttaaatattgaggatgagcatcgtttacatgagacatcaaaagaacccgacgtgagcttagggtcaacgtggctttctgacttcccccaggcgtgggcggagactggcggaatggggttagctgtccgccaagcaccgttgatcatcccgttaaaggcaacgtctacacctgtctctatcaaacagtaccccatgagtcgtgaggcccgcctggggattaagccacatattcgtcgcttgtatgaccaggggatcttggtcccatgtcaatctccgtggaacaccccccttcgtcccgtgaaaaagccaggtacaaacgattatcgtccagttcaagatcttcgcgaggtcaacaaacgcgtagaagacatccatccgactgtacctaatccttataatctgttatcaggcctgcccccatcgcaccaatggtatacagtattagacttgaaagacgcgttcttttgcctgcgtctgcacccaacgtctcagccgctgtttgcgttcgaatggcgtgatcctgaaatgggaatttcgggtcagttaacctggactcgtctgccccagggctttaaaaacagccccacattgttcgatgaagcacttcaccgtgacttagcagacttccgtatccaacacccagacttaattctgttacagtatgttgacgaccttttgttggcggcaacgtctgaacttgactgtcagcaaggcacacgcgcgttattacaaacgttaggtaacttaggatatcgtgcgtccgcgaaaaaggcgcaaatttgtcaaaaacaggtaaagtaccttgggtatttgctgaaagaaggtcaacgttggattactgatgcgcgtaaggagaccgtaatggggcagcctacgcctaagacgccacgcgaattgcgtgaatttttgggcaaagcgggattctgtcgtttatggattcctgggttcgctgaaatggctgcacccctgtaccccttaacaaaaacagggacgcttttcaactgggggccagaccagcaaaaggcgtatcaggagatcaaacaagctttgttgaccgcacccgcgttgggtcttccggatttaaccaagccctttgagctgttcgttgatgaaaaacagggatatgcaaaaggagtattaacccaaaagttaggcccgtggcgtcgccctgttgcttacttgagtaaaaaattggatcctgtcgcagcaggatggccaccgtgcttgcgtatggtcgcggcaattgccgttttgacaaaggatgcaggtaagttgacgatgggtcaacccttaaacatcttggctccacatgctgtagaagcgttagtaaagcagcccccagaccgctggctttctaatgcgcgcatgacccactatcaggcgcttctgcttgatacggatcgtgtacaatttggaccagttgtagctttgaatccagctactttgcttccccttccagaagaaggacttcagcacaattgtttagatattctggccgaggcacatgggacgcgccctgatttgacggatcagccactgcctgatgccgaccatacatggtatactggcggcagtagtcttcttgtagaggggcaacgcaaggcgggagcagccgtcactacggagaccgaagttatctgggccaaagcgttacccgcgggaacatccgcgcaacgtgcacagttaatcgctctgacacaggccctgaagatggcagagggcaaaaagttgaatgtctacaccaactcacgttatgcttttgcaacagcgcattggcatggcgaaatttaccgccgccgtggtctgctgactagtgagggtaaggaaattaaaaataaagatgagattcttgcgttgttaaaagctttattcttaccaaaacgcctttcgatcattcattgcccggggcatcaaaagggtcactcagcggaggctcgtggaaaccgtatggcggaccaagctgcccgtaaggcggcgatcacagagaccccggatacatcaacgctgttgatcgaaaacagctctccctacactagcgagcatttttaa

SEQ ID NO: 165 - DNA, 2115 bp, synthetic construct
  source 1..2115: mol_type = other DNA
atgggcagcagccatcatcatcatcatcacagcagcggcctggtgccgcgcggcagccatatgactttaaatattgaggatgagcatcgtttacatgagacatcaaaagaacccgacgtgagcttagggtcaacgtggctttctgacttcccccaggcgtgggcggagactggcggaatggggttagctgtccgccaagcaccgttgatcatcccgttaaaggcaacgtctacacctgtctctatcaaacagtaccccatgagtcgtgaggcccgcctggggattaagccacatattcgtcgcttgtatgaccaggggatcttggtcccatgtcaatctccgtggaacaccccccttcgtcccgtgaaaaagccaggtacaaacgattatcgtccagttcaagatcttcgcgaggtcaacaaacgcgtagaagacatccatccgactgtacctaatccttataatctgttatcaggcctgcccccatcgcaccaatggtatacagtattagacttgaaagacgcgttcttttgcctgcgtctgcacccaacgtctcagccgctgtttgcgttcgaatgggaggatcctgaaatgggaatttcgggtcagttaacctggactcgtctgccccagggctttaaaaacagccccacattgttcgatgaagcacttcaccgtgacttagcagacttccgtatccaacacccagacttaattctgttacagtatgttgacgaccttttgttggcggcaacgtctgaacttgactgtcagcaaggcacacgcgcgttattacaaacgttaggtaacttaggatatcgtgcgtccgcgaaaaaggcgcaaatttgtcaaaaacaggtaaagtaccttgggtatttgctgaaagaaggtcaacgttggattactgatgcgcgtaaggagaccgtaatggggcagcctacgcctaagacgccacgcgaattgcgtgaatttttgggcaaagcgggattctgtcgtttatggattcctgggttcgctgaaatggctgcacccctgtaccccttaacaaaaacagggacgcttttcaactgggggccagaccagcaaaaggcgtatcaggagatcaaacaagctttgttgaccgcacccgcgttgggtcttccggatttaaccaagccctttgagctgttcgttgatgaaaaacagggatatgcaaaaggagtattaacccaaaagttaggcccgtggcgtcgccctgttgcttacttgagtaaaaaattggatcctgtcgcagcaggatggccaccgtgcttgcgtatggtcgcggcaattgccgttttgacaaaggatgcaggtaagttgacgatgggtcaacccttaaacatcttggctccacatgctgtagaagcgttagtaaagcagcccccagaccgctggctttctaatgcgcgcatgacccactatcaggcgcttctgcttgatacggatcgtgtacaatttggaccagttgtagctttgaatccagctactttgcttccccttccagaagaaggacttcagcacaattgtttagatattctggccgaggcacatgggacgcgccctgatttgacggatcagccactgcctgatgccgaccatacatggtatactggcggcagtagtcttcttcaagaggggcaacgcaaggcgggagcagccgtcactacggagaccgaagttatctgggccaaagcgttacccgcgggaacatccgcgcaacgtgcacagttaatcgctctgacacaggccctgaagatggcagagggcaaaaagttgaatgtctacaccaactcacgttatgcttttgcaacagcgcattggcatggcgaaatttaccgccgccgtggtctgctgactagtgagggtaaggaaattaaaaataaagatgagattcttgcgttgttaaaagctttattcttaccaaaacgcctttcgatcattcattgcccggggcatcaaaagggtcactcagcggaggctcgtggaaaccgtatggcggaccaagctgcccgtaaggcggcgatcacagagaccccggatacatcaacgctgttgatcgaaaacagctctccctacactagcgagcatttttaa

SEQ ID NO: 166 - DNA, 2115 bp, synthetic construct
  source 1..2115: mol_type = other DNA
atgggcagcagccatcatcatcatcatcacagcagcggcctggtgccgcgcggcagccatatgactttaaatattgaggatgagcatgcgttacatgagacatcaaaagaacccgacgtgagcttagggtcaacgtggctttctgacttcccccaggcgtgggcggagactggcggaatggggttagctgtccgccaagcaccgttgatcatcccgttaaaggcaacgtctacacctgtctctatcaaacagtaccccatgagtcgtgaggcccgcctggggattaagccacatattcgtcgcttgtatgaccaggggatcttggtcccatgtcaatctccgtggaacaccccccttcgtcccgtgaaaaagccaggtacaaacgattatcgtccagttcaagatcttcgcgaggtcaacaaacgcgtagaagacatccatccgactgtacctaatccttataatctgttatcaggcctgcccccatcgcaccaatggtatacagtattagacttgaaagacgcgttcttttgcctgcgtctgcacccaacgtctcagccgctgtttgcgttcgaatggcgtgatcctgaaatgggaatttcgggtcagttaacctggactcgtctgccccagggctttaaaaacagccccacattgttcgatgaagcacttcaccgtgacttagcagacttccgtatccaacacccagacttaattctgttacagtatgttgacgaccttttgttggcggcaacgtctgaacttgactgtcagcaaggcacacgcgcgttattacaaacgttaggtaacttaggatatcgtgcgtccgcgaaaaaggcgcaaatttgtcaaaaacaggtaaagtaccttgggtatttgctgaaagaaggtcaacgttggattactgatgcgcgtaaggagaccgtaatggggcagcctacgcctaagacgccacgcgaattgcgtgaatttttgggcaaagcgggattctgtcgtttatggattcctgggttcgctgaaatggctgcacccctgtaccccttaacaaaaacagggacgcttttcaactgggggccagaccagcaaaaggcgtatcaggagatcaaacaagctttgttgaccgcacccgcgttgggtcttccggatttaaccaagccctttgagctgttcgttgatgaaaaacagggatatgcaaaaggagtattaacccaaaagttaggcccgtggcgtcgccctgttgcttacttgagtaaaaaattggatcctgtcgcagcaggatggccaccgtgcttgcgtatggtcgcggcaattgccgttttgacaaaggatgcaggtaagttgacgatgggtcaacccttaaacatcttggctccacatgctgtagaagcgttagtaaagcagcccccagaccgctggctttctaatgcgcgcatgacccactatcaggcgcttctgcttgatacggatcgtgtacaatttggaccagttgtagctttgaatccagctactttgcttccccttccagaagaaggacttcagcacaattgtttagatattctggccgaggcacatgggacgcgccctgatttgacggatcagccactgcctgatgccgaccatacatggtatactggcggcagtagtcttcttcaagaggggcaacgcaaggcgggagcagccgtcactacggagaccgaagttatctgggccaaagcgttacccgcgggaacatccgcgcaacgtgcacagttaatcgctctgacacaggccctgaagatggcagagggcaaaaagttgaatgtctacaccaactcacgttatgcttttgcaacagcgcattggcatggcgaaatttaccgccgccgtggtctgctgactagtgagggtaaggaaattaaaaataaagatgagattcttgcgttgttaaaagctttattcttaccaaaacgcctttcgatcattcattgcccggggcatcaaaagggtcactcagcggaggctcgtggaaaccgtatggcggaccaagctgcccgtaaggcggcgatcacagagaccccggatacatcaacgctgttgatcgaaaacagctctccctacactagcgagcatttttaa

SEQ ID NO: 167 - DNA, 2115 bp, synthetic construct
  source 1..2115: mol_type = other DNA
atgggcagcagccatcatcatcatcatcacagcagcggcctggtgccgcgcggcagccatatgactttaaatattgaggatgagcatttattacatgagacatcaaaagaacccgacgtgagcttagggtcaacgtggctttctgacttcccccaggcgtgggcggagactggcggaatggggttagctgtccgccaagcaccgttgatcatcccgttaaaggcaacgtctacacctgtctctatcaaacagtaccccatgagtcgtgaggcccgcctggggattaagccacatattcgtcgcttgtatgaccaggggatcttggtcccatgtcaatctccgtggaacaccccccttcgtcccgtgaaaaagccaggtacaaacgattatcgtccagttcaagatcttcgcgaggtcaacaaacgcgtagaagacatccatccgactgtacctaatccttataatctgttatcaggcctgcccccatcgcaccaatggtatacagtattagacttgaaagacgcgttcttttgcctgcgtctgcacccaacgtctcagccgctgtttgcgttcgaatggcgtgatcctgaaatgggaatttcgggtcagttaacctggactcgtctgccccagggctttaaaaacagccccacattgttcgatgaagcacttcaccgtgacttagcagacttccgtatccaacacccagacttaattctgttacagtatgttgacgaccttttgttggcggcaacgtctgaacttgactgtcagcaaggcacacgcgcgttattacaaacgttaggtaacttaggatatcgtgcgtccgcgaaaaaggcgcaaatttgtcaaaaacaggtaaagtaccttgggtatttgctgaaagaaggtcaacgttggattactgatgcgcgtaaggagaccgtaatggggcagcctacgcctaagacgccacgcgaattgcgtgaatttttgggcaaagcgggattctgtcgtttatggattcctgggttcgctgaaatggctgcacccctgtaccccttaacaaaaacagggacgcttttcaactgggggccagaccagcaaaaggcgtatcaggagatcaaacaagctttgttgaccgcacccgcgttgggtcttccggatttaaccaagccctttgagctgttcgttgatgaaaaacagggatatgcaaaaggagtattaacccaaaagttaggcccgtggcgtcgccctgttgcttacttgagtaaaaaattggatcctgtcgcagcaggatggccaccgtgcttgcgtatggtcgcggcaattgccgttttgacaaaggatgcaggtaagttgacgatgggtcaacccttaaacatcttggctccacatgctgtagaagcgttagtaaagcagcccccagaccgctggctttctaatgcgcgcatgacccactatcaggcgcttctgcttgatacggatcgtgtacaatttggaccagttgtagctttgaatccagctactttgcttccccttccagaagaaggacttcagcacaattgtttagatattctggccgaggcacatgggacgcgccctgatttgacggatcagccactgcctgatgccgaccatacatggtatactggcggcagtagtcttcttcaagaggggcaacgcaaggcgggagcagccgtcactacggagaccgaagttatctgggccaaagcgttacccgcgggaacatccgcgcaacgtgcacagttaatcgctctgacacaggccctgaagatggcagagggcaaaaagttgaatgtctacaccaactcacgttatgcttttgcaacagcgcattggcatggcgaaatttaccgccgccgtggtctgctgactagtgagggtaaggaaattaaaaataaagatgagattcttgcgttgttaaaagctttattcttaccaaaacgcctttcgatcattcattgcccggggcatcaaaagggtcactcagcggaggctcgtggaaaccgtatggcggaccaagctgcccgtaaggcggcgatcacagagaccccggatacatcaacgctgttgatcgaaaacagctctccctacactagcgagcatttttaa

SEQ ID NO: 168 - DNA, 2115 bp, synthetic construct
  source 1..2115: mol_type = other DNA
atgggcagcagccatcatcatcatcatcacagcagcggcctggtgccgcgcggcagccatatgactttaaatattgaggatgagcatcgtttacatgagacatcaaaagaacccgacgtgagcttagggtcaacgtggctttctgacttcccccaggcgtgggcggagactggcggaatggggttagctgtccgccaagcaccgttgatcatcccgttaaaggcaacgtctacacctgtctctatcaaacagtaccccatgagtcgtgaggcccgcctggggattaagccacatattcgtcgcttgtatgaccaggggatcttggtcccatgtcaatctccgtggaacaccccccttcgtcccgtgaaaaagccaggtacaaacgattatcgtccagttcaagatcttcgcgaggtcaacaaacgcgtagaagacatccatccgactgtacctaatccttataatctgttattcggcctgcccccatcgcaccaatggtatacagtattagacttgaaagacgcgttcttttgcctgcgtctgcacccaacgtctcagccgctgtttgcgttcgaatggcgtgatcctgaaatgggaatttcgggtcagttaacctggactcgtctgccccagggctttaaaaacagccccacattgttcgatgaagcacttcaccgtgacttagcagacttccgtatccaacacccagacttaattctgttacagtatgttgacgaccttttgttggcggcaacgtctgaacttgactgtcagcaaggcacacgcgcgttattacaaacgttaggtaacttaggatatcgtgcgtccgcgaaaaaggcgcaaatttgtcaaaaacaggtaaagtaccttgggtatttgctgaaagaaggtcaacgttggattactgatgcgcgtaaggagaccgtaatggggcagcctacgcctaagacgccacgcgaattgcgtgaatttttgggcaaagcgggattctgtcgtttatggattcctgggttcgctgaaatggctgcacccctgtaccccttaacaaaaacagggacgcttttcaactgggggccagaccagcaaaaggcgtatcaggagatcaaacaagctttgttgaccgcacccgcgttgggtcttccggatttaaccaagccctttgagctgttcgttgatgaaaaacagggatatgcaaaaggagtattaacccaaaagttaggcccgtggcgtcgccctgttgcttacttgagtaaaaaattggatcctgtcgcagcaggatggccaccgtgcttgcgtatggtcgcggcaattgccgttttgacaaaggatgcaggtaagttgacgatgggtcaacccttaaacatcttggctccacatgctgtagaagcgttagtaaagcagcccccagaccgctggctttctaatgcgcgcatgacccactatcaggcgcttctgcttgatacggatcgtgtacaatttggaccagttgtagctttgaatccagctactttgcttccccttccagaagaaggacttcagcacaattgtttagatattctggccgaggcacatgggacgcgccctgatttgacggatcagccactgcctgatgccgaccatacatggtatactggcggcagtagtcttcttcaagaggggcaacgcaaggcgggagcagccgtcactacggagaccgaagttatctgggccaaagcgttacccgcgggaacatccgcgcaacgtgcacagttaatcgctctgacacaggccctgaagatggcagagggcaaaaagttgaatgtctacaccaactcacgttatgcttttgcaacagcgcattggcatggcgaaatttaccgccgccgtggtctgctgactagtgagggtaaggaaattaaaaataaagatgagattcttgcgttgttaaaagctttattcttaccaaaacgcctttcgatcattcattgcccggggcatcaaaagggtcactcagcggaggctcgtggaaaccgtatggcggaccaagctgcccgtaaggcggcgatcacagagaccccggatacatcaacgctgttgatcgaaaacagctctccctacactagcgagcatttttaa

SEQ ID NO: 169 - DNA, 2115 bp, synthetic construct
  source 1..2115: mol_type = other DNA
atgggcagcagccatcatcatcatcatcacagcagcggcctggtgccgcgcggcagccatatgactttaaatattgaggatgagcatcgtttacatgagacatcaaaagaacccgacgtgagcttagggtcaacgtggctttctgacttcccccaggcgtgggcggagactggcggaatggggttagctgtccgccaagcaccgttgatcatcccgttaaaggcaacgtctacacctgtctctatcaaacagtaccccatgagtcgtgaggcccgcctggggattaagccacatattcgtcgcttgtatgaccaggggatcttggtcccatgtcaatctccgtggaacaccccccttcgtcccgtgaaaaagccaggtacaaacgattatcgtccagttcaagatcttcgcgaggtcaacaaacgcgtagaagacatccatccgactgtacctaatccttataatctgttatcaggcctgcccccatcgcaccaatggtatacagtattagacttgaaagacgcgttcttttgcctgcgtctgcacccaacgtctcagccgctgtttgcgttcgaatggcgtgatcctgaaatgggaatttcgggtcagttaacctggactcgtctgccccagggctttaaaaacagccccacattgttcgatgaagcacttcaccgtgacttagcagacttccgtatccaacacccagacttaattctgttacagtatgttgacgaccttttgttggcggcaacgtctgaacttgactgtcagcaaggcacacgcgcgttattacaaacgttaggtaacttaggatatcgtgcgtccgcgaaaaaggcgcaaatttgtcaaaaacaggtaaagtaccttgggtatttgctgaaagaaggtcaacgttggattactgatgcgcgtaaggagaccgtaatggggcagcctacgcctaagacgccacgcgaattgcgtgaatttttgggcaaagcgggattctgtcgtttatggattcctgggttcgctgaaatggctgcacccctgtaccccttaacaaaaacagggacgcttttcaactgggggccagaccagcaaaaggcgtatcaggagatcaaacaagctttgttgaccgcacccgcgttgggtcttccggatttaaccaagccctttgagctgttcgttgatgaaaaacagggatatgcaaaaggagtattaacccaaaagttaggcccgtggcgtcgccctgttgcttacttgagtaaaaaattggatcctgtcgcagcaggatggccaccgtgcttgcgtatggtcgcggcaattgccgttttgacaaaggatgcaggtaagttgtgtatgggtcaacccttaaacatcttggctccacatgctgtagaagcgttagtaaagcagcccccagaccgctggctttctaatgcgcgcatgacccactatcaggcgcttctgcttgatacggatcgtgtacaatttggaccagttgtagctttgaatccagctactttgcttccccttccagaagaaggacttcagcacaattgtttagatattctggccgaggcacatgggacgcgccctgatttgacggatcagccactgcctgatgccgaccatacatggtatactggcggcagtagtcttcttcaagaggggcaacgcaaggcgggagcagccgtcactacggagaccgaagttatctgggccaaagcgttacccgcgggaacatccgcgcaacgtgcacagttaatcgctctgacacaggccctgaagatggcagagggcaaaaagttgaatgtctacaccaactcacgttatgcttttgcaacagcgcattggcatggcgaaatttaccgccgccgtggtctgctgactagtgagggtaaggaaattaaaaataaagatgagattcttgcgttgttaaaagctttattcttaccaaaacgcctttcgatcattcattgcccggggcatcaaaagggtcactcagcggaggctcgtggaaaccgtatggcggaccaagctgcccgtaaggcggcgatcacagagaccccggatacatcaacgctgttgatcgaaaacagctctccctacactagcgagcatttttaa

SEQ ID NO: 170 - DNA, 2115 bp, synthetic construct
  source 1..2115: mol_type = other DNA
atgggcagcagccatcatcatcatcatcacagcagcggcctggtgccgcgcggcagccatatgactttaaatattgaggatgagcatcgtttacatgagacatcaaaagaacccgacgtgagcttagggtcaacgtggctttctgacttcccccaggcgtgggcggagactggcggaatggggttagctgtccgccaagcaccgttgatcatcccgttaaaggcaacgtctacacctgtctctatcaaacagtaccccatgagtcgtgaggcccgcctggggattaagccacatattcgtcgcttgtatgaccaggggatcttggtcccatgtcaatctccgtggaacaccccccttcgtcccgtgaaaaagccaggtacaaacgattatcgtccagttcaagatcttcgcgaggtcaacaaacgcgtagaagacatccatccgactgtacctaatccttataatctgttatcaggcctgcccccatcgcaccaatggtatacagtattagacttgaaagacgcgttcttttgcctgcgtctgcacccaacgtctcagccgctgtttgcgttcgaatggcgtgatcctgaaatgggaatttcgggtcagttaacctggactcgtctgccccagggctttaaaaacagccccacattgttcgatgaagcacttcaccgtgacttagcagacttccgtatccaacacccagacttaattctgttacagtatgttgacgaccttttgttggcggcaacgtctgaacttgactgtcagcaaggcacacgcgcgttattacaaacgttaggtaacttaggatatcgtgcgtccgcgaaaaaggcgcaaatttgtcaaaaacaggtaaagtaccttgggtatttgctgaaagaaggtcaacgttggattactgatgcgcgtaaggagaccgtaatggggcagcctacgcctaagacgccacgcgaattgcgtgaatttttgggcaaagcgggattctgtcgtttatggattcctgggttcgctgaaatggctgcacccctgtaccccttaacaaaaacagggacgcttttcaactgggggccagaccagcaaaaggcgtatcaggagatcaaacaagctttgttgaccgcacccgcgttgggtcttccggatttaaccaagccctttgagctgttcgttgatgaaaaacagggatatgcaaaaggagtattaacccaaaagttaggcccgtggcgtcgccctgttgcttacttgagtaaaaaattggatcctgtcgcagcaggatggccaccgtgcttgcgtatggtcgcggcaattgccgttttgacaaaggatgcaggtaagttgacgatgggtcaacccttaaacatcttggctccacatgctgtagaagcgttagtaaagcagcccccagaccgctggctttctaatgcgcgcatgacccactatcaggcgcttctgcttgataacgatcgtgtacaatttggaccagttgtagctttgaatccagctactttgcttccccttccagaagaaggacttcagcacaattgtttagatattctggccgaggcacatgggacgcgccctgatttgacggatcagccactgcctgatgccgaccatacatggtatactggcggcagtagtcttcttcaagaggggcaacgcaaggcgggagcagccgtcactacggagaccgaagttatctgggccaaagcgttacccgcgggaacatccgcgcaacgtgcacagttaatcgctctgacacaggccctgaagatggcagagggcaaaaagttgaatgtctacaccaactcacgttatgcttttgcaacagcgcattggcatggcgaaatttaccgccgccgtggtctgctgactagtgagggtaaggaaattaaaaataaagatgagattcttgcgttgttaaaagctttattcttaccaaaacgcctttcgatcattcattgcccggggcatcaaaagggtcactcagcggaggctcgtggaaaccgtatggcggaccaagctgcccgtaaggcggcgatcacagagaccccggatacatcaacgctgttgatcgaaaacagctctccctacactagcgagcatttttaa

SEQ ID NO: 171 - DNA, 2115 bp, synthetic construct
  source 1..2115: mol_type = other DNA
atgggcagcagccatcatcatcatcatcacagcagcggcctggtgccgcgcggcagccatatgactttaaatattgaggatgagcatcgtttacatgagacatcaaaagaacccgacgtgagcttagggtcaacgtggctttctgacttcccccaggcgtgggcggagactggcggaatggggttagctgtccgccaagcaccgttgatcatcccgttaaaggcaacgtctacacctgtctctatcaaacagtaccccatgagtcgtgaggcccgcctggggattaagccacatattcgtcgcttgtatgaccaggggatcttggtcccatgtcaatctccgtggaacaccccccttcgtcccgtgaaaaagccaggtacaaacgattatcgtccagttcaagatcttcgcgaggtcaacaaacgcgtagaagacatccatccgactgtacctaatccttataatctgttatcaggcctgcccccatcgcaccaatggtatacagtattagacttgaaagacgcgttcttttgcctgcgtctgcacccaacgtctcagccgctgtttgcgttcgaatggcgtgatcctgaaatgggaatttcgggtcagttaacctggactcgtctgccccagggctttaaaaacagccccacattgttcgatgaagcacttcaccgtgacttagcagacttccgtatccaacacccagacttaattctgttacagtatgttgacgaccttttgttggcggcaacgtctgaacttgactgtcagcaaggcacacgcgcgttattacaaacgttaggtaacttaggatatcgtgcgtccgcgaaaaaggcgcaaatttgtcaaaaacaggtaaagtaccttgggtatttgctgaaagaaggtcaacgttggattactgatgcgcgtaaggagaccgtaatggggcagcctacgcctaagacgccacgcgaattgcgtgaatttttgggcaaagcgggattctgtcgtttatggattcctgggttcgctgaaatggctgcacccctgtaccccttaacaaaaacagggacgcttttcaactgggggccagaccagcaaaaggcgtatcaggagatcaaacaagctttgttgaccgcacccgcgttgggtcttccggatttaaccaagccctttgagctgttcgttgatgaaaaacagggatatgcaaaaggagtattaacccaaaagttaggcccgtggcgtcgccctgttgcttacttgagtaaaaaattggatcctgtcgcagcaggatggccaccgtgcttgcgtatggtcgcggcaattgccgttttgacaaaggatgcaggtaagttgacgatgggtcaacccttaaacatcttggctccacatgctgtagaagcgttagtaaagcagcccccagaccgctggctttctaatgcgcgcatgacccactatcaggcgcttctgcttgatacggatcgtgtacaatttggaccagttgtagctttgaatccagctactttgcttccccttccagaagaaggacttcagcacaattgtttagatattctggccgaggcacatgggtctcgccctgatttgacggatcagccactgcctgatgccgaccatacatggtatactggcggcagtagtcttcttcaagaggggcaacgcaaggcgggagcagccgtcactacggagaccgaagttatctgggccaaagcgttacccgcgggaacatccgcgcaacgtgcacagttaatcgctctgacacaggccctgaagatggcagagggcaaaaagttgaatgtctacaccaactcacgttatgcttttgcaacagcgcattggcatggcgaaatttaccgccgccgtggtctgctgactagtgagggtaaggaaattaaaaataaagatgagattcttgcgttgttaaaagctttattcttaccaaaacgcctttcgatcattcattgcccggggcatcaaaagggtcactcagcggaggctcgtggaaaccgtatggcggaccaagctgcccgtaaggcggcgatcacagagaccccggatacatcaacgctgttgatcgaaaacagctctccctacactagcgagcatttttaa

SEQ ID NO: 172 - DNA, 2115 bp, synthetic construct
  source 1..2115: mol_type = other DNA
atgggcagcagccatcatcatcatcatcacagcagcggcctggtgccgcgcggcagccatatgactttaaatattgaggatgagcatcgtttacatgagacatcaaaagaacccgacgtgagcttagggtcaacgtggctttctgacttcccccaggcgtgggcggagactggcggaatggggttagctgtccgccaagcaccgttgatcatcccgttaaaggcaacgtctacacctgtctctatcaaacagtaccccatgagtcgtgaggcccgcctggggattaagccacatattcgtcgcttgtatgaccaggggatcttggtcccatgtcaatctccgtggaacaccccccttcgtcccgtgaaaaagccaggtacaaacgattatcgtccagttcaagatcttcgcgaggtcaacaaacgcgtagaagacatccatccgacttatcctaatccttataatctgttatcaggcctgcccccatcgcaccaatggtatacagtattagacttgaaagacgcgttcttttgcctgcgtctgcacccaacgtctcagccgctgtttgcgttcgaatggcgtgatcctgaaatgggaatttcgggtcagttaacctggactcgtctgccccagggctttaaaaacagccccacattgttcgatgaagcacttcaccgtgacttagcagacttccgtatccaacacccagacttaattctgttacagtatgttgacgaccttttgttggcggcaacgtctgaacttgactgtcagcaaggcacacgcgcgttattacaaacgttaggtaacttaggatatcgtgcgtccgcgaaaaaggcgcaaatttgtcaaaaacaggtaaagtaccttgggtatttgctgaaagaaggtcaacgttggattactgatgcgcgtaaggagaccgtaatggggcagcctacgcctaagacgccacgcgaattgcgtgaatttttgggcaaagcgggattctgtcgtttatggattcctgggttcgctgaaatggctgcacccctgtaccccttaacaaaaacagggacgcttttcaactgggggccagaccagcaaaaggcgtatcaggagatcaaacaagctttgttgaccgcacccgcgttgggtcttccggatttaaccaagccctttgagctgttcgttgatgaaaaacagggatatgcaaaaggagtattaacccaaaagttaggcccgtggcgtcgccctgttgcttacttgagtaaaaaattggatcctgtcgcagcaggatggccaccgtgcttgcgtatggtcgcggcaattgccgttttgacaaaggatgcaggtaagttgacgatgggtcaacccttaaacatcttggctccacatgctgtagaagcgttagtaaagcagcccccagaccgctggctttctaatgcgcgcatgacccactatcaggcgcttctgcttgatacggatcgtgtacaatttggaccagttgtagctttgaatccagctactttgcttccccttccagaagaaggacttcagcacaattgtttagatattctggccgaggcacatgggacgcgccctgatttgacggatcagccactgcctgatgccgaccatacatggtatactggcggcagtagtcttcttcaagaggggcaacgcaaggcgggagcagccgtcactacggagaccgaagttatctgggccaaagcgttacccgcgggaacatccgcgcaacgtgcacagttaatcgctctgacacaggccctgaagatggcagagggcaaaaagttgaatgtctacaccaactcacgttatgcttttgcaacagcgcattggcatggcgaaatttaccgccgccgtggtctgctgactagtgagggtaaggaaattaaaaataaagatgagattcttgcgttgttaaaagctttattcttaccaaaacgcctttcgatcattcattgcccggggcatcaaaagggtcactcagcggaggctcgtggaaaccgtatggcggaccaagctgcccgtaaggcggcgatcacagagaccccggatacatcaacgctgttgatcgaaaacagctctccctacactagcgagcatttttaa

SEQ ID NO: 173 - DNA, 2115 bp, synthetic construct
  source 1..2115: mol_type = other DNA
atgggcagcagccatcatcatcatcatcacagcagcggcctggtgccgcgcggcagccatatgactttaaatattgaggatgagcatcgtttacatgagacatcaaaagaacccgacgtgagcttagggtcaacgtggctttctgacttcccccaggcgtgggcggagactggcggaatggggttagctgtccgccaagcaccgttgatcatcccgttaaaggcaacgtctacacctgtctctatcaaacagtaccccatgagtcgtgaggcccgcctggggattaagccacatattcgtcgcttgtatgaccaggggatcttggtcccatgtcaatctccgtggaacaccccccttcgtcccgtgaaaaagccaggtacaaacgattatcgtccagttcaagatcttcgcgaggtcaacaaacgcgtagaagacatccatccgactgtacctaatccttataatctgttatcaggcctgcccccatcgcaccaatggtatacagtattagacttgaaagacgcgttcttttgcctgcgtctgcacccaacgtctcagccgctgtttgcgttcgaatggcgtgatcctgaaatgggaatttcgggtcagttaacctggactcgtctgccccagggctttaaaaacagccccacattgttcgatgaagcacttcaccgtgacttagcagacttccgtatccaacacccagacttaattctgttacagtatgttgacgaccttttgttggcggcaacgtctgaacttgactgtcagcaaggcacacgcgcgttattacaaacgttaggtaacttaggatatcgtgcgtccgcgaaaaaggcgcaaatttgtcaaaaacaggtaaagtaccttgggtatttgctgaaagaaggtcaacgttggattactgatgcgcgtaaggagaccgtaatggggcagcctacgcctaagacgccacgcgaattgcgtgaatttttgggcaaagcgggattctgtcgtttatggattcctgggttcgctgaaatggctgcacccctgtaccccttaacaaaaacagggacgcttttcaactgggggccagaccagcaaaaggcgtatcaggagatcaaacaagctttgttgaccgcacccgcgttgggtcttccggatttaaccaagccctttgagctgttcagcgatgaaaaacagggatatgcaaaaggagtattaacccaaaagttaggcccgtggcgtcgccctgttgcttacttgagtaaaaaattggatcctgtcgcagcaggatggccaccgtgcttgcgtatggtcgcggcaattgccgttttgacaaaggatgcaggtaagttgacgatgggtcaacccttaaacatcttggctccacatgctgtagaagcgttagtaaagcagcccccagaccgctggctttctaatgcgcgcatgacccactatcaggcgcttctgcttgatacggatcgtgtacaatttggaccagttgtagctttgaatccagctactttgcttccccttccagaagaaggacttcagcacaattgtttagatattctggccgaggcacatgggacgcgccctgatttgacggatcagccactgcctgatgccgaccatacatggtatactggcggcagtagtcttcttcaagaggggcaacgcaaggcgggagcagccgtcactacggagaccgaagttatctgggccaaagcgttacccgcgggaacatccgcgcaacgtgcacagttaatcgctctgacacaggccctgaagatggcagagggcaaaaagttgaatgtctacaccaactcacgttatgcttttgcaacagcgcattggcatggcgaaatttaccgccgccgtggtctgctgactagtgagggtaaggaaattaaaaataaagatgagattcttgcgttgttaaaagctttattcttaccaaaacgcctttcgatcattcattgcccggggcatcaaaagggtcactcagcggaggctcgtggaaaccgtatggcggaccaagctgcccgtaaggcggcgatcacagagaccccggatacatcaacgctgttgatcgaaaacagctctccctacactagcgagcatttttaa

SEQ ID NO: 174 - DNA, 2115 bp, synthetic construct
  source 1..2115: mol_type = other DNA
atgggcagcagccatcatcatcatcatcacagcagcggcctggtgccgcgcggcagccatatgactttaaatattgaggatgagcatcgtttacatgagacatcaaaagaacccgacgtgagcttagggtcaacgtggctttctgacttcccccaggcgtgggcggagactggcggaatggggttagctgtccgccaagcaccgttgatcatcccgttaaaggcaacgtctacacctgtctctatcaaacagtaccccatgagtcgtgaggcccgcctggggattaagccacatattcgtcgcttgtatgaccaggggatcttggtcccatgtcaatctccgtggaacaccccccttcgtcccgtgaaaaagccaggtacaaacgattatcgtccagttcaagatcttcgcgaggtcaacaaacgcgtagaagacatccatccgactgtacctaatccttataatctgttatcaggcctgcccccatcgcaccaatggtatacagtattagacttgaaagacgcgttcttttgcctgcgtctgcacccaacgtctcagccgctgtttgcgttcgaatggcgtgatcctgaaatgggaatttcgggtcagttaacctggactcgtctgccccagggctttaaaaacagccccacattgttcgatgaagcacttcaccgtgacttagcagacttccgtatccaacacccagacttaattctgttacagtatgttgacgaccttttgttggcggcaacgtctgaacttgactgtcagcaaggcacacgcgcgttattacaaacgttaggtaacttaggatatcgtgcgtccgcgaaaaaggcgcaaatttgtcaaaaacaggtaaagtaccttgggtatttgctgaaagaaggtcaacgttggattactgatgcgcgtaaggagaccgtaatggggcagcctacgcctaagacgccacgcgaattgcgtgaatttttgggcaaagcgggattctgtcgtttatggattcctgggttcgctgaaatggctgcacccctgtaccccttaacaaaaacagggacgcttttcaactgggggccagaccagcaaaaggcgtatcaggagatcaaacaagctttgttgaccgcacccgcgttgggtcttccggatttaaccaagccctttgagctgttcgttgatgaaaaacagggatatgcaaaaggatctttaacccaaaagttaggcccgtggcgtcgccctgttgcttacttgagtaaaaaattggatcctgtcgcagcaggatggccaccgtgcttgcgtatggtcgcggcaattgccgttttgacaaaggatgcaggtaagttgacgatgggtcaacccttaaacatcttggctccacatgctgtagaagcgttagtaaagcagcccccagaccgctggctttctaatgcgcgcatgacccactatcaggcgcttctgcttgatacggatcgtgtacaatttggaccagttgtagctttgaatccagctactttgcttccccttccagaagaaggacttcagcacaattgtttagatattctggccgaggcacatgggacgcgccctgatttgacggatcagccactgcctgatgccgaccatacatggtatactggcggcagtagtcttcttcaagaggggcaacgcaaggcgggagcagccgtcactacggagaccgaagttatctgggccaaagcgttacccgcgggaacatccgcgcaacgtgcacagttaatcgctctgacacaggccctgaagatggcagagggcaaaaagttgaatgtctacaccaactcacgttatgcttttgcaacagcgcattggcatggcgaaatttaccgccgccgtggtctgctgactagtgagggtaaggaaattaaaaataaagatgagattcttgcgttgttaaaagctttattcttaccaaaacgcctttcgatcattcattgcccggggcatcaaaagggtcactcagcggaggctcgtggaaaccgtatggcggaccaagctgcccgtaaggcggcgatcacagagaccccggatacatcaacgctgttgatcgaaaacagctctccctacactagcgagcatttttaa

SEQ ID NO: 175 - DNA, 2115 bp, synthetic construct
  source 1..2115: mol_type = other DNA
atgggcagcagccatcatcatcatcatcacagcagcggcctggtgccgcgcggcagccatatgactttaaatattgaggatgagcatcgtttacatgagacatcaaaagaacccgacgtgagcttagggtcaacgtggctttctgacttcccccaggcgtgggcggagactggcggaatggggttagctgtccgccaagcaccgttgatcatcccgttaaaggcaacgtctacacctgtctctatcaaacagtaccccatgagtcgtgaggcccgcctggggattaagccacatattcgtcgcttgtatgaccaggggatcttggtcccatgtcaatctccgtggaacaccccccttcgtcccgtgaaaaagccaggtacaaacgattatcgtccagttcaagatcttcgcgaggtcaacaaacgcgtagaagacatccatccgactgtacctaatccttataatctgttatcaggcctgcccccatcgcaccaatggtatacagtattagacttgaaagacgcgttcttttgcctgcgtctgcacccaacgtctcagccgctgtttgcgttcgaatggcgtgatcctgaaatgggaatttcgggtcagttaacctggactcgtctgccccagggctttaaaaacagccccacattgttcgatgaagcacttcaccgtgacttagcagacttccgtatccaacacccagacttaattctgttacagtatgttgacgaccttttgttggcggcaacgtctgaacttgactgtcagcaaggcacacgcgcgttattacaaacgttaggtaacttaggatatcgtgcgtccgcgaaaaaggcgcaaatttgtcaaaaacaggtaaagtaccttgggtatttgctgaaagaaggtcaacgttggattactgatgcgcgtaaggagaccgtaatggggcagcctacgcctaagacgccacgcgaattgcgtgaatttttgggcaaagcgggattctgtcgtttatggattcctgggttcgctgaaatggctgcacccctgtaccccttaacaaaaacagggacgcttttcaactgggggccagaccagcaaaaggcgtatcaggagatcaaacaagctttgttgaccgcacccgcgttgggtcttccggatttaaccaagccctttgagctgttcgttgatgaaaaacagggaattgcaaaaggagtattaacccaaaagttaggcccgtggcgtcgccctgttgcttacttgagtaaaaaattggatcctgtcgcagcaggatggccaccgtgcttgcgtatggtcgcggcaattgccgttttgacaaaggatgcaggtaagttgacgatgggtcaacccttaaacatcttggctccacatgctgtagaagcgttagtaaagcagcccccagaccgctggctttctaatgcgcgcatgacccactatcaggcgcttctgcttgatacggatcgtgtacaatttggaccagttgtagctttgaatccagctactttgcttccccttccagaagaaggacttcagcacaattgtttagatattctggccgaggcacatgggacgcgccctgatttgacggatcagccactgcctgatgccgaccatacatggtatactggcggcagtagtcttcttcaagaggggcaacgcaaggcgggagcagccgtcactacggagaccgaagttatctgggccaaagcgttacccgcgggaacatccgcgcaacgtgcacagttaatcgctctgacacaggccctgaagatggcagagggcaaaaagttgaatgtctacaccaactcacgttatgcttttgcaacagcgcattggcatggcgaaatttaccgccgccgtggtctgctgactagtgagggtaaggaaattaaaaataaagatgagattcttgcgttgttaaaagctttattcttaccaaaacgcctttcgatcattcattgcccggggcatcaaaagggtcactcagcggaggctcgtggaaaccgtatggcggaccaagctgcccgtaaggcggcgatcacagagaccccggatacatcaacgctgttgatcgaaaacagctctccctacactagcgagcatttttaa

SEQ ID NO: 176 - DNA, 2115 bp, synthetic construct
  source 1..2115: mol_type = other DNA
atgggcagcagccatcatcatcatcatcacagcagcggcctggtgccgcgcggcagccatatgactttaaatattgaggatgagcatcgtttacatgagacatcaaaagaacccgacgtgagcttagggtcaacgtggctttctgacttcccccaggcgtgggcggagactggcggaatggggttagctgtccgccaagcaccgttgatcatcccgttaaaggcaacgtctacacctgtctctatcaaacagtaccccatgagtcgtgaggcccgcctggggattaagccacatattcgtcgcttgtatgaccaggggatcttggtcccatgtcaatctccgtggaacaccccccttcgtcccgtgaaaaagccaggtacaaacgattatcgtccagttcaagatcttcgcgaggtcaacaaacgcgtagaagacatccatccgactgtacctaatccttataatctgttatcaggcctgcccccatcgcaccaatggtatacagtattagacttgaaagacgcgttcttttgcctgcgtctgcacccaacgtctcagccgctgtttgcgttcgaatggcgtgatcctgaaatgggaatttcgggtcagttaacctggactcgtctgccccagggctttaaaaacagccccacattgttcgatgaagcacttcaccgtgacttagcagacttccgtatccaacacccagacttaattctgttacagtatgttgacgaccttttgttggcggcaacgtctgaacttgactgtcagcaaggcacacgcgcgttattacaaacgttaggtaacttaggatatcgtgcgtccgcgaaaaaggcgcaaatttgtcaaaaacaggtaaagtaccttgggtatttgctgaaagaaggtcaacgttggattactgatgcgcgtaaggagaccgtaatggggcagcctacgcctaagacgccacgcgaattgcgtgaatttttgggcaaagcgggattctgtcgtttatggattcctgggttcgctgaaatggctgcacccctgtaccccttaacaaaaacagggacgcttttcaactgggggccagaccagcaaaaggcgtatcaggagatcaaacaagctttgttgaccgcacccgcgttgggtcttccggatttaaccaagccctttgagctgttcgttgatgaaaaacagggatatgcaaaaggagtattaacccaaaagttaggcccgtggcgtcgccctgttgcttacttgagtaaaaaattggatcctgtcgcagcaggatggccaccgtgcttgcgtatggtcgcggcaattgccgttttgacaaaggatgcaggtaagttgacgatgggtcaacccttaaacatcttggctccacatgctgtagaagcgttagtaaagcagcccccagaccgctggctttctaatgcgcgcatgacccactatcaggcgcttctgcttgatacggatcgtgtacaatttggaccagttgtatatttgaatccagctactttgcttccccttccagaagaaggacttcagcacaattgtttagatattctggccgaggcacatgggacgcgccctgatttgacggatcagccactgcctgatgccgaccatacatggtatactggcggcagtagtcttcttcaagaggggcaacgcaaggcgggagcagccgtcactacggagaccgaagttatctgggccaaagcgttacccgcgggaacatccgcgcaacgtgcacagttaatcgctctgacacaggccctgaagatggcagagggcaaaaagttgaatgtctacaccaactcacgttatgcttttgcaacagcgcattggcatggcgaaatttaccgccgccgtggtctgctgactagtgagggtaaggaaattaaaaataaagatgagattcttgcgttgttaaaagctttattcttaccaaaacgcctttcgatcattcattgcccggggcatcaaaagggtcactcagcggaggctcgtggaaaccgtatggcggaccaagctgcccgtaaggcggcgatcacagagaccccggatacatcaacgctgttgatcgaaaacagctctccctacactagcgagcatttttaa

SEQ ID NO: 177 - DNA, 2115 bp, synthetic construct
  source 1..2115: mol_type = other DNA
atgggcagcagccatcatcatcatcatcacagcagcggcctggtgccgcgcggcagccatatgactttaaatattgaggatgagcatcgtttacatgagacatcaaaagaacccgacgtgagcttagggtcaacgtggctttctgacttcccccaggcgtgggcggagactggcggaatggggttagctgtccgccaagcaccgttgatcatcccgttaaaggcaacgtctacacctgtctctatcaaacagtaccccatgagtcgtgaggcccgcctggggattaagccacatattcgtcgcttgtatgaccaggggatcttggtcccatgtcaatctccgtggaacaccccccttcgtcccgtgaaaaagccaggtacaaacgattatcgtccagttcaagatcttcgcgaggtcaacaaacgcgtagaagacatccatccgactgtacctaatccttataatctgttatcaggcctgcccccatcgcaccaatggtatacagtattagacttgaaagacgcgttcttttgcctgcgtctgcacccaacgtctcagccgctgtttgcgttcgaatggcgtgatcctgaaatgggaatttcgggtcagttaacctggactcgtctgccccagggctttaaaaacagccccacattgttcgatgaagcacttcaccgtgacttagcagacttccgtatccaacacccagacttaattctgttacagtatgttgacgaccttttgttggcggcaacgtctgaacttgactgtcagcaaggcacacgcgcgttattacaaacgttaggtaacttaggatatcgtgcgtccgcgaaaaaggcgcaaatttgtcaaaaacaggtaaagtaccttgggtatttgctgaaagaaggtcaacgttggattactgatgcgcgtaaggagaccgtaatggggcagcctacgcctaagacgccacgcgaattgcgtgaatttttgggcaaagcgggattctgtcgtttatggattcctgggttcgctgaaatggctgcacccctgtaccccttaacaaaaacagggacgcttttcaactgggggccagaccagcaaaaggcgtatcaggagatcaaacaagctttgttgaccgcacccgcgttgggtcttccggatttaaccaagccctttgagctgttcgttgatgaaaaacagggatatgcaaaaggagtattaacccaaaagttaggcccgtggcgtcgccctgttgcttacttgagtaaaaaattggatcctgtcgcagcaggatggccaccgtgcttgcgtatggtcgcggcaattgccgttttgacaaaggatgcaggtaagttgacgatgggtcaacccttaaacatcttggctccacatgctgtagaagcgttagtaaagcagcccccagaccgctggctttctaatgcgcgcatgacccactatcaggcgcttctgcttgatacggatcgtgtacaatttggaccagttgtagctttgaatccagctactttgcttccccttccagaagaaggacttcagcacaattgtttagatattctggccgaggcacatgggacgcgccctgatttgacggatcagccactgcctgatgccgaccatacatggtatactggcggcagtagtcttcttcaagaggggcaacgcaaggcgggagcagccgtcactacggagaccgaagttatctgggccaaagcgttacccgcgggaacatccgcgcaacgtgcacagttaatcgctctgacacaggccctgaagatggcagagggcaaaaagttgaatgtctacaccaactcacgttatacatttgcaacagcgcattggcatggcgaaatttaccgccgccgtggtctgctgactagtgagggtaaggaaattaaaaataaagatgagattcttgcgttgttaaaagctttattcttaccaaaacgcctttcgatcattcattgcccggggcatcaaaagggtcactcagcggaggctcgtggaaaccgtatggcggaccaagctgcccgtaaggcggcgatcacagagaccccggatacatcaacgctgttgatcgaaaacagctctccctacactagcgagcatttttaa

SEQ ID NO: 178 - DNA, 2115 bp, synthetic construct
  source 1..2115: mol_type = other DNA
atgggcagcagccatcatcatcatcatcacagcagcggcctggtgccgcgcggcagccatatgactttaaatattgaggatgagcatcgtttacatgagacatcaaaagaacccgacgtgagcttagggtcaacgtggctttctgacttcccccaggcgtgggcggagactggcggaatggggttagctgtccgccaagcaccgttgatcatcccgttaaaggcaacgtctacacctgtctctatcaaacagtaccccatgagtcgtgaggcccgcctggggattaagccacatattcgtcgcttgtatgaccaggggatcttggtcccatgtcaatctccgtggaacaccccccttcgtcccgtgaaaaagccaggtacaaacgattatcgtccagttcaagatcttcgcgaggtcaacaaacgcgtagaagacatccatccgactgtacctaatccttataatctgttatcaggcctgcccccatcgcaccaatggtatacagtattagacttgaaagacgcgttcttttgcctgcgtctgcacccaacgtctcagccgctgtttgcgttcgaatggcgtgatcctgaaatgggaatttcgggtcagttaacctggactcgtctgccccagggctttaaaaacagccccacattgttcgatgaagcacttcaccgtgacttagcagacttccgtatccaacacccagacttaattctgttacagtatgttgacgaccttttgttggcggcaacgtctgaacttgactgtcagcaaggcacacgcgcgttattacaaacgttaggtaacttaggatatcgtgcgtccgcgaaaaaggcgcaaatttgtcaaaaacaggtaaagtaccttgggtatttgctgaaagaaggtcaacgttggattactgatgcgcgtaaggagaccgtaatggggcagcctacgcctaagacgccacgcgaattgcgtgaatttttgggcaaagcgggattctgtcgtttatggattcctgggttcgctgaaatggctgcacccctgtaccccttaacaaaaacagggacgcttttcaactgggggccagaccagcaaaaggcgtatcaggagatcaaacaagctttgttgaccgcacccgcgttgggtcttccggatttaaccaagccctttgagctgttcgttgatgaaaaacagggatatgcaaaaggagtattaacccaaaagttaggcccgtggcgtcgccctgttgcttacttgagtaaaaaattggatcctgtcgcagcaggatggccaccgtgcttgcgtatggtcgcggcaattgccgttttgacaaaggatgcaggtaagttgacgatgggtcaacccttaaacatcttggctccacatgctgtagaagcgttagtaaagcagcccccagaccgctggctttctaatgcgcgcatgacccactatcaggcgcttctgcttgatacggatcgtgtacaatttggaccagttgtagctttgaatccagctactttgcttccccttccagaagaaggacttcagcacaattgtttagatattctggccgaggcacatgggacgcgccctgatttgacggatcagccactgcctgatgccgaccatacatggtatactaacggcagtagtcttcttcaagaggggcaacgcaaggcgggagcagccgtcactacggagaccgaagttatctgggccaaagcgttacccgcgggaacatccgcgcaacgtgcacagttaatcgctctgacacaggccctgaagatggcagagggcaaaaagttgaatgtctacaccaactcacgttatgcttttgcaacagcgcattggcatggcgaaatttaccgccgccgtggtctgctgactagtgagggtaaggaaattaaaaataaagatgagattcttgcgttgttaaaagctttattcttaccaaaacgcctttcgatcattcattgcccggggcatcaaaagggtcactcagcggaggctcgtggaaaccgtatggcggaccaagctgcccgtaaggcggcgatcacagagaccccggatacatcaacgctgttgatcgaaaacagctctccctacactagcgagcatttttaa

SEQ ID NO: 179 - DNA, 2115 bp, synthetic construct
  source 1..2115: mol_type = other DNA
atgggcagcagccatcatcatcatcatcacagcagcggcctggtgccgcgcggcagccatatgactttaaatattgaggatgagcatcgtttacatgagacatcaaaagaacccgacgtgagcttagggtcaacgtggctttctgacttcccccaggcgtgggcggagactggcggaatggggttagctgtccgccaagcaccgttgatcatcccgttaaaggcaacgtctacacctgtctctatcaaacagtaccccatgagtcgtgaggcccgcctggggattaagccacatattcgtcgcttgtatgaccaggggatcttggtcccatgtcaatctccgtggaacaccccccttcgtcccgtgaaaaagccaggtacaaacgattatcgtccagttcaagatcttcgcgaggtcaacaaacgcgtagaagacatccatccgactgtacctaatccttataatctgttatcaggcctgcccccatcgcaccaatggtatacagtattagacttgaaagacgcgttcttttgcctgcgtctgcacccaacgtctcagccgctgtttgcgttcgaatggcgtgatcctgaaatgggaatttcgggtcagttaacctggactcgtctgccccagggctttaaaaacagccccacattgttcgatgaagcacttcaccgtgacttagcagacttccgtatccaacacccagacttaattctgttacagtatgttgacgaccttttgttggcggcaacgtctgaacttgactgtcagcaaggcacacgcgcgttattacaaacgttaggtaacttaggatatcgtgcgtccgcgaaaaaggcgcaaatttgtcaaaaacaggtaaagtaccttgggtatttgctgaaagaaggtcaacgttggattactgatgcgcgtaaggagaccgtaatggggcagcctacgcctaagacgccacgcgaattgcgtgaatttttgggcaaagcgggattctgtcgtttatggattcctgggttcgctgaaatggctgcacccctgtaccccttaacaaaaacagggacgcttttcaactgggggccagaccagcaaaaggcgtatcaggagatcaaacaagctttgttgaccgcacccgcgttgggtcttccggatttaaccaagccctttgagctgttcgttgatgaaaaacagggatatgcaaaaggagtattaacccaaaagttaggcccgtggcgtcgccctgttgcttacttgagtaaaaaattggatcctgtcgcagcaggatggccaccgtgcttgcgtatggtcgcggcaattgccgttttgacaaaggatgcaggtaagttgacgatgggtcaacccttaaacatcttggctccacatgctgtagaagcgttagtaaagcagcccccagaccgctggctttctaatgcgcgcatgacccactatcaggcgcttctgcttgatacggatcgtgtacaatttggatctgttgtagctttgaatccagctactttgcttccccttccagaagaaggacttcagcacaattgtttagatattctggccgaggcacatgggacgcgccctgatttgacggatcagccactgcctgatgccgaccatacatggtatactggcggcagtagtcttcttcaagaggggcaacgcaaggcgggagcagccgtcactacggagaccgaagttatctgggccaaagcgttacccgcgggaacatccgcgcaacgtgcacagttaatcgctctgacacaggccctgaagatggcagagggcaaaaagttgaatgtctacaccaactcacgttatgcttttgcaacagcgcattggcatggcgaaatttaccgccgccgtggtctgctgactagtgagggtaaggaaattaaaaataaagatgagattcttgcgttgttaaaagctttattcttaccaaaacgcctttcgatcattcattgcccggggcatcaaaagggtcactcagcggaggctcgtggaaaccgtatggcggaccaagctgcccgtaaggcggcgatcacagagaccccggatacatcaacgctgttgatcgaaaacagctctccctacactagcgagcatttttaa

SEQ ID NO: 180 - DNA, 2115 bp, synthetic construct
  source 1..2115: mol_type = other DNA
atgggcagcagccatcatcatcatcatcacagcagcggcctggtgccgcgcggcagccatatgactttaaatattgaggatgagcatcgtttacatgagacatcaaaagaacccgacgtgagcttagggtcaacgtggctttctgacttcccccaggcgtgggcggagactggcggaatggggttagctgtccgccaagcaccgttgatcatcccgttaaaggcaacgtctacacctgtctctatcaaacagtaccccatgagtcgtgaggcccgcctggggattaagccacatattcgtcgcttgtatgaccaggggatcttggtcccatgtcaatctccgtggaacaccccccttcgtcccgtgaaaaagccaggtacaaacgattatcgtccagttcaagatcttcgcgaggtcaacaaacgcgtagaagacatccatccgactgtacctaatccttataatctgttatcaggcctgcccccatcgcaccaatggtatacagtattagacttgaaagacgcgttcttttgcctgcgtctgcacccaacgtctcagccgctgtttgcgttcgaatggcgtgatcctgaaatgggaatttcgggtcagttaacctggactcgtctgccccagggctttaaaaacagccccacattgttcgatgaagcacttcaccgtgacttagcagacttccgtatccaacacccagacttaattctgttacagtatgttgacgaccttttgttggcggcaacgtctgaacttgactgtcagcaaggcacacgcgcgttattacaaacgttaggtaacttaggatatcgtgcgtccgcgaaaaaggcgcaaatttgtcaaaaacaggtaaagtaccttgggtatttgctgaaagaaggtcaacgttggattactgatgcgcgtaaggagaccgtaatggggcagcctacgcctaagacgccacgcgaattgcgtgaatttttgggcaaagcgggattctgtcgtttatggattcctgggttcgctgaaatggctgcacccctgtaccccttaacaaaaacagggacgcttttcaactgggggccagaccagcaaaaggcgtatcaggagatcaaacaagctttgttgaccgcacccgcgttgggtcttccggatttaaccaagccctttgagctgttcgttgatgaaaaacagggatatgcaaaaggagtattaacccaaaagttaggcccgtggcgtcgccctgttgcttacttgagtaaaaaattggatcctgtcgcagcaggatggccaccgtgcttgcgtatggtcgcggcaattgccgttttgacaaaggatgcaggtaagttgacgatgggtcaacccttaaacatcttggctccacatgctgtagaagcgttagtaaagcagcccccagaccgctggctttctaatgcgcgcatgacccactatcaggcgcttctgcttgatacggatcgtgtacaatttggaccagttgtagctttgaatccagctactttgcttccccttccagaagaaggacttcagcacaattgtttagatattctggccgaggcacatgggacgcgccctgatttgacggatcagccactgcctgatgccgaccatacatggtatttaggcggcagtagtcttcttcaagaggggcaacgcaaggcgggagcagccgtcactacggagaccgaagttatctgggccaaagcgttacccgcgggaacatccgcgcaacgtgcacagttaatcgctctgacacaggccctgaagatggcagagggcaaaaagttgaatgtctacaccaactcacgttatgcttttgcaacagcgcattggcatggcgaaatttaccgccgccgtggtctgctgactagtgagggtaaggaaattaaaaataaagatgagattcttgcgttgttaaaagctttattcttaccaaaacgcctttcgatcattcattgcccggggcatcaaaagggtcactcagcggaggctcgtggaaaccgtatggcggaccaagctgcccgtaaggcggcgatcacagagaccccggatacatcaacgctgttgatcgaaaacagctctccctacactagcgagcatttttaa

SEQ ID NO: 181 - DNA, 2115 bp, synthetic construct
  source 1..2115: mol_type = other DNA
atgggcagcagccatcatcatcatcatcacagcagcggcctggtgccgcgcggcagccatatgactttaaatattgaggatgagcatcgtttacatgagacatcaaaagaacccgacgtgagcttagggtcaacgtggctttctgacttcccccaggcgtgggcggagactggcggaatggggttagctgtccgccaagcaccgttgatcatcccgttaaaggcaacgtctacacctgtctctatcaaacagtaccccatgagtcgtgaggcccgcctggggattaagccacatattcgtcgcttgtatgaccaggggatcttggtcccatgtcaatctccgtggaacaccccccttcgtcccgtgaaaaagccaggtacaaacgattatcgtccagttcaagatcttcgcgaggtcaacaaacgcgtagaagacatccatccgactgtacctaatccttataatctgttatcaggcctgcccccatcgcaccaatggtatacagtattagacttgaaagacgcgttcttttgcctgcgtctgcacccaacgtctcagccgctgtttgcgttcgaatggcgtgatcctgaaatgggaatttcgggtcagttaacctggactcgtctgccccagggctttaaaaacagccccacattgttcgatgaagcacttcaccgtgacttagcagacttccgtatccaacacccagacttaattctgttacagtatgttgacgaccttttgttggcggcaacgtctgaacttgactgtcagcaaggcacacgcgcgttattacaaacgttaggtaacttaggatatcgtgcgtccgcgaaaaaggcgcaaatttgtcaaaaacaggtaaagtaccttgggtatttgctgaaagaaggtcaacgttggattactgatgcgcgtaaggagaccgtaatggggcagcctacgcctaagacgccacgcgaattgcgtgaatttttgggcaaagcgggattctgtcgtttatggattcctgggttcgctgaaatggctgcacccctgtaccccttaacaaaaacagggacgcttttcaactgggggccagaccagcaaaaggcgtatcaggagatcaaacaagctttgttgaccgcacccgcgttgggtcttccggatttaaccaagccctttgagctgttcgttgatgaaaaacagggatatgcaaaaggagtattaacccaaaagttaggcccgtggcgtcgccctgttgcttacttgagtaaaaaattggatcctgtcgcagcaggatggccaccgtgcttgcgtatggtcgcggcaattgccgttttgacaaaggatgcaggtaagttgacgatgggtcaacccttaaacatcttggctccacatgctgtagaagcgttagtaaagcagcccccagaccgctggctttctaatgcgcgcatgacccactatcaggcgcttctgcttgatacggatcgtgtacaatttggaccagttgtagctttgaatccagctactttgcttccccttccagaagaaggacttcagcacaattgtttagatattctggccgaggcacatgggacgcgccctgatttgacggatcagccactgcctgatgccgaccatacatggtatactggcggcagtagtcttcttcaagaggggcaacgcaaggcgggagcagccgtcactacggagaccgaagttatctgggccaaagcgttacccgcgggaacatccgcgcaacgtgcacagttaatcgctctgacacaggccctgaagatggcagagggcaaaaagttgaatgtctacaccaactcacgttatgcttttgcaacagcgcatttacatggcgaaatttaccgccgccgtggtctgctgactagtgagggtaaggaaattaaaaataaagatgagattcttgcgttgttaaaagctttattcttaccaaaacgcctttcgatcattcattgcccggggcatcaaaagggtcactcagcggaggctcgtggaaaccgtatggcggaccaagctgcccgtaaggcggcgatcacagagaccccggatacatcaacgctgttgatcgaaaacagctctccctacactagcgagcatttttaa

SEQ ID NO: 182 - DNA, 2115 bp, synthetic construct
  source 1..2115: mol_type = other DNA
atgggcagcagccatcatcatcatcatcacagcagcggcctggtgccgcgcggcagccatatgactttaaatattgaggatgagcatcgtttacatgagacatcaaaagaacccgacgtgagcttagggtcaacgtggctttctgacttcccccaggcgtgggcggagactggcggaatggggttagctgtccgccaagcaccgttgatcatcccgttaaaggcaacgtctacacctgtctctatcaaacagtaccccatgagtcgtgaggcccgcctggggattaagccacatattcgtcgcttgtatgaccaggggatcttggtcccatgtcaatctccgtggaacaccccccttcgtcccgtgaaaaagccaggtacaaacgattatcgtccagttcaagatcttcgcgaggtcaacaaacgcgtagaagacatccatccgactgtacctaatccttataatctgttatcaggcctgcccccatcgcaccaatggtatacagtattagacttgaaagacgcgttcttttgcctgcgtctgcacccaacgtctcagccgctgtttgcgttcgaatggcgtgatcctgaaatgggaatttcgggtcagttaacctggactcgtctgccccagggctttaaaaacagccccacattgttcgatgaagcacttcaccgtgacttagcagacttccgtatccaacacccagacttaattctgttacagtatgttgacgaccttttgttggcggcaacgtctgaacttgactgtcagcaaggcacacgcgcgttattacaaacgttaggtaacttaggatatcgtgcgtccgcgaaaaaggcgcaaatttgtcaaaaacaggtaaagtaccttgggtatttgctgaaagaaggtcaacgttggattactgatgcgcgtaaggagaccgtaatggggcagcctacgcctaagacgccacgcgaattgcgtgaatttttgggcaaagcgggattctgtcgtttatggattcctgggttcgctgaaatggctgcacccctgtaccccttaacaaaaacagggacgcttttcaactgggggccagaccagcaaaaggcgtatcaggagatcaaacaagctttgttgaccgcacccgcgttgggtcttccggatttaaccaagccctttgagctgttcgttgatgaaaaacagggatatgcaaaaggagtattaacccaaaagttaggcccgtggcgtcgccctgttgcttacttgagtaaaaaattggatcctgtcgcagcaggatggccaccgtgcttgcgtatggtcgcggcaattgccgttttgacaaaggatgcaggtaagttgacgatgggtcaacccttaaacatcttggctccacatgctgtagaagcgttagtaaagcagcccccagaccgctggctttctaatgcgcgcatgacccactatcaggcgcttctgcttgatacggatcgtgtacaatttggaccagttgtagctttgaatccagctactttgcttccccttccagaagaaggacttcagcacaattgtttagatattctgcaagaggcacatgggacgcgccctgatttgacggatcagccactgcctgatgccgaccatacatggtatactggcggcagtagtcttcttcaagaggggcaacgcaaggcgggagcagccgtcactacggagaccgaagttatctgggccaaagcgttacccgcgggaacatccgcgcaacgtgcacagttaatcgctctgacacaggccctgaagatggcagagggcaaaaagttgaatgtctacaccaactcacgttatgcttttgcaacagcgcattggcatggcgaaatttaccgccgccgtggtctgctgactagtgagggtaaggaaattaaaaataaagatgagattcttgcgttgttaaaagctttattcttaccaaaacgcctttcgatcattcattgcccggggcatcaaaagggtcactcagcggaggctcgtggaaaccgtatggcggaccaagctgcccgtaaggcggcgatcacagagaccccggatacatcaacgctgttgatcgaaaacagctctccctacactagcgagcatttttaa

SEQ ID NO: 183 - DNA, 2115 bp, synthetic construct
  source 1..2115: mol_type = other DNA
atgggcagcagccatcatcatcatcatcacagcagcggcctggtgccgcgcggcagccatatgactttaaatattgaggatgagcatcgtttacatgagacatcaaaagaacccgacgtgagcttagggtcaacgtggctttctgacttcccccaggcgtgggcggagactggcggaatggggttagctgtccgccaagcaccgttgatcatcccgttaaaggcaacgtctacacctgtctctatcaaacagtaccccatgagtcgtgaggcccgcctggggattaagccacatattcgtcgcttgtatgaccaggggatcttggtcccatgtcaatctccgtggaacaccccccttcgtcccgtgaaaaagccaggtacaaacgattatcgtccagttcaagatcttcgcgaggtcaacaaacgcgtagaagacatccatccgactgtacctaatccttataatctgttatcaggcctgcccccatcgcaccaatggtatacagtattagacttgaaagacgcgttcttttgcctgcgtctgcacccaacgtctcagccgctgtttgcgttcgaatggcgtgatcctgaaatgggaatttcgggtcagttaacctggactcgtctgccccagggctttaaaaacagccccacattgttcgatgaagcacttcaccgtgacttagcagacttccgtatccaacacccagacttaattctgttacagtatgttgacgaccttttgttggcggcaacgtctgaacttgactgtcagcaaggcacacgcgcgttattacaaacgttaggtaacttaggatatcgtgcgtccgcgaaaaaggcgcaaatttgtcaaaaacaggtaaagtaccttgggtatttgctgaaagaaggtcaacgttggattactgatgcgcgtaaggagaccgtaatggggcagcctacgcctaagacgccacgcgaattgcgtgaatttttgggcaaagcgggattctgtcgtttatggattcctgggttcgctgaaatggctgcacccctgtaccccttaacaaaaacagggacgcttttcaactgggggccagaccagcaaaaggcgtatcaggagatcaaacaagctttgttgaccgcacccgcgttgggtcttccggatttaaccaagccctttgagctgttcgttgatgaaaaacagggatatgcaaaaggagtattaacccaaaagttaggcccgtggcgtcgccctgttgcttacttgagtaaaaaattggatcctgtcgcagcaggatggccaccgtgcttgcgtatggtcgcggcaattgccgttttgacaaaggatgcaggtaagttgacgatgggtcaacccttaaacatcttggctccacatgctgtagaagcgttagtaaagcagcccccagaccgctggctttctaatgcgcgcatgacccactatcaggcgcttctgcttgatacggatcgtgtacaatttggaccagttgtagctttgaatccagctactttgcttccccttccagaagaaggacttcagcacaattgtttagatattctggccgaggcacatgggacgcgccctgatttgacggatcagccactgcctgatgccgaccatacatggtatactggcggcagtagtcttcttcaagaggggcaacgcaaggcgggagcagccgtcactacggagaccgaagttatctgggccaaagcgttacccgcgggaacatccgcgcaacgtgcacagttaatcgctctgacacaggccctgaagatggcagagggcaaaaagttgaatgtctacaccaactcacgttatgcttttgcaacagcgcattggcatggcgaaatttaccgccgccgtggtctgctgactagtgagggtaaggaaattaaaaataaagatgagattcttcgtttgttaaaagctttattcttaccaaaacgcctttcgatcattcattgcccggggcatcaaaagggtcactcagcggaggctcgtggaaaccgtatggcggaccaagctgcccgtaaggcggcgatcacagagaccccggatacatcaacgctgttgatcgaaaacagctctccctacactagcgagcatttttaa

SEQ ID NO: 184 - DNA, 2115 bp, synthetic construct
  source 1..2115: mol_type = other DNA
atgggcagcagccatcatcatcatcatcacagcagcggcctggtgccgcgcggcagccatatgactttaaatattgaggatgagcatcgtttacatgagacatcaaaagaacccgacgtgagcttagggtcaacgtggctttctgacttcccccaggcgtgggcggagactggcggaatggggttagctgtccgccaagcaccgttgatcatcccgttaaaggcaacgtctacacctgtctctatcaaacagtaccccatgagtcgtgaggcccgcctggggattaagccacatattcgtcgcttgtatgaccaggggatcttggtcccatgtcaatctccgtggaacaccccccttcgtcccgtgaaaaagccaggtacaaacgattatcgtccagttcaagatcttcgcgaggtcaacaaacgcgtagaagacatccatccgactgtacctaatccttataatctgttatcaggcctgcccccatcgcaccaatggtatacagtattagacttgaaagacgcgttcttttgcctgcgtctgcacccaacgtctcagccgctgtttgcgttcgaatggcgtgatcctgaaatgggaatttcgggtcagttaacctggactcgtctgccccagggctttaaaaacagccccacattgttcgatgaagcacttcaccgtgacttagcagacttccgtatccaacacccagacttaattctgttacagtatgttgacgaccttttgttggcggcaacgtctgaacttgactgtcagcaaggcacacgcgcgttattacaaacgttaggtaacttaggatatcgtgcgtccgcgaaaaaggcgcaaatttgtcaaaaacaggtaaagtaccttgggtatttgctgaaagaaggtcaacgttggattactgatgcgcgtaaggagaccgtaatggggcagcctacgcctaagacgccacgcgaattgcgtgaatttttgggcaaagcgggattctgtcgtttatggattcctgggttcgctgaaatggctgcacccctgtaccccttaacaaaaacagggacgcttttcaactgggggccagaccagcaaaaggcgtatcaggagatcaaacaagctttgttgaccgcacccgcgttgggtcttccggatttaaccaagccctttgagctgttcgttgatgaaaaacagggatatgcaaaaggagtattaacccaaaagttaggcccgtggcgtcgccctgttgcttacttgagtaaaaaattggatcctgtcgcagcaggatggccaccgtgcttgcgtatggtcgcggcaattgccgttttgacaaaggatgcaggtaagttgacgatgggtcaacccttaaacatcttggctccacatgctgtagaagcgttagtaaagcagcccccagaccgctggctttctaatgcgcgcatgacccactatcaggcgcttctgcttgatacggatcgtgtacaatttggaccagttgtagctttgaatccagctactttgcttccccttccagaagaaggacttcagcacaattgtttagatattctggccgaggcacatgggacgcgccctgatttgacggatcagccactgcctgatgccgaccatacatggtatactggcggcagtagtcttcttcaagaggggcaacgcaaggcgggagcagccgtcactacggagaccgaagttatctgggccaaagcgttacccgcgggaacatccgcgcaacgtgcacagttaatcgctctgacacaggccctgaagatggcagagggcaaaaagttgaatgtctacaccaactcacgttatgcttttgcaacagcgcattggcatggcgaaatttaccgccgccgtggtctgctgactagtgagggtaaggaaattaaaaataaagatgagattcttgcgttgttaaaagctttattcttaccaaaaacactttcgatcattcattgcccggggcatcaaaagggtcactcagcggaggctcgtggaaaccgtatggcggaccaagctgcccgtaaggcggcgatcacagagaccccggatacatcaacgctgttgatcgaaaacagctctccctacactagcgagcatttttaa

SEQ ID NO: 185 - DNA, 2115 bp, synthetic construct
  source 1..2115: mol_type = other DNA
atgggcagcagccatcatcatcatcatcacagcagcggcctggtgccgcgcggcagccatatgactttaaatattgaggatgagcatgcgttacatgagacatcaaaagaacccgacgtgagcttagggtcaacgtggctttctgacttcccccaggcgtgggcggagactggcggaatggggttagctgtccgccaagcaccgttgatcatcccgttaaaggcaacgtctacacctgtctctatcaaacagtaccccatgagtcgtgaggcccgcctggggattaagccacatattcgtcgcttgtatgaccaggggatcttggtcccatgtcaatctccgtggaacaccccccttcgtcccgtgaaaaagccaggtacaaacgattatcgtccagttcaagatcttcgcgaggtcaacaaacgcgtagaagacatccatccgactgtacctaatccttataatctgttatcaggcctgcccccatcgcaccaatggtatacagtattagacttgaaagacgcgttctttgcgctgcgtctgcacccaacgtctcagccgctgtttgcgttcgaatggcgtgatcctgaaatgggaatttcgggtcagttaacctggactcgtctgccccagggctttaaaaacagccccacattgttcgatgaagcacttcaccgtgacttagcagacttccgtatccaacacccagacttaattctgttacagtatgttgacgaccttttgttggcggcaacgtctgaacttgactgtcagcaaggcacacgcgcgttattacaaacgttaggtaacttaggatatcgtgcgtccgcgaaaaaggcgcaaatttgtcaaaaacaggtaaagtaccttgggtatttgctgaaagaaggtcaacgttggattactgatgcgcgtaaggagaccgtaatggggcagcctacgcctaagacgccacgcgaattgcgtgaatttttgggcaaagcgggattctgtcgtttatggattcctgggttcgctgaaatggctgcacccctgtaccccttaacaaaaacagggacgcttttcaactgggggccagaccagcaaaaggcgtatcaggagatcaaacaagctttgttgaccgcacccgcgttgggtcttccggatttaaccaagccctttgagctgttcgttgatgaaaaacagggatatgcaaaaggagtattaacccaaaagttaggcccgtggcgtcgccctgttgcttacttgagtaaaaaattggatcctgtcgcagcaggatggccaccgtgcttgcgtatggtcgcggcaattgccgttttgacaaaggatgcaggtaagttgacgatgggtcaacccttaaacatcttggctccacatgctgtagaagcgttagtaaagcagcccccagaccgctggctttctaatgcgcgcatgacccactatcaggcgcttctgcttgatacggatcgtgtacaatttggaccagttgtagctttgaatccagctactttgcttccccttccagaagaaggacttcagcacaattgtttagatattctggccgaggcacatgggacgcgccctgatttgacggatcagccactgcctgatgccgaccatacatggtatactggcggcagtagtcttcttcaagaggggcaacgcaaggcgggagcagccgtcactacggagaccgaagttatctgggccaaagcgttacccgcgggaacatccgcgcaacgtgcacagttaatcgctctgacacaggccctgaagatggcagagggcaaaaagttgaatgtctacaccaactcacgttatgcttttgcaacagcgcattggcatggcgaaatttaccgccgccgtggtctgctgactagtgagggtaaggaaattaaaaataaagatgagattcttgcgttgttaaaagctttattcttaccaaaacgcctttcgatcattcattgcccggggcatcaaaagggtcactcagcggaggctcgtggaaaccgtatggcggaccaagctgcccgtaaggcggcgatcacagagaccccggatacatcaacgctgttgatcgaaaacagctctccctacactagcgagcatttttaa

SEQ ID NO: 186 - DNA, 2115 bp, synthetic construct
  source 1..2115: mol_type = other DNA
atgggcagcagccatcatcatcatcatcacagcagcggcctggtgccgcgcggcagccatatgactttaaatattgaggatgagcatcgtttacatgagacatcaaaagaacccgacgtgagcttagggtcaacgtggctttctgacttcccccaggcgtgggcggagactggcggaatggggttagctgtccgccaagcaccgttgatcatcccgttaaaggcaacgtctacacctgtctctatcaaacagtaccccatgagtcgtgaggcccgcctggggattaagccacatattcgtcgcttgtatgaccaggggatcttggtcccatgtcaatctccgtggaacaccccccttcgtcccgtgaaaaagccaggtacaaacgattatcgtccagttcaagatcttcgcgaggtcaacaaacgcgtagaagacatccatccgactgtacctaatccttataatctgttatcaggcctgcccccatcgcaccaatggtatacagtattagacttgaaagacgcgttctttgcgctgccgctgcacccaacgtctcagccgctgtttgcgttcgaatggcgtgatcctgaaatgggaatttcgggtcagttaacctggactcgtctgccccagggctttaaaaacagccccacattgttcgatgaagcacttcaccgtgacttagcagacttccgtatccaacacccagacttaattctgttacagtatgttgacgaccttttgttggcggcaacgtctgaacttgactgtcagcaaggcacacgcgcgttattacaaacgttaggtaacttaggatatcgtgcgtccgcgaaaaaggcgcaaatttgtcaaaaacaggtaaagtaccttgggtatttgctgaaagaaggtcaacgttggattactgatgcgcgtaaggagaccgtaatggggcagcctacgcctaagacgccacgcgaattgcgtgaatttttgggcaaagcgggattctgtcgtttatggattcctgggttcgctgaaatggctgcacccctgtaccccttaacaaaaacagggacgcttttcaactgggggccagaccagcaaaaggcgtatcaggagatcaaacaagctttgttgaccgcacccgcgttgggtcttccggatttaaccaagccctttgagctgttcgttgatgaaaaacagggatatgcaaaaggagtattaacccaaaagttaggcccgtggcgtcgccctgttgcttacttgagtaaaaaattggatcctgtcgcagcaggatggccaccgtgcttgcgtatggtcgcggcaattgccgttttgacaaaggatgcaggtaagttgacgatgggtcaacccttaaacatcttggctccacatgctgtagaagcgttagtaaagcagcccccagaccgctggctttctaatgcgcgcatgacccactatcaggcgcttctgcttgatacggatcgtgtacaatttggaccagttgtagctttgaatccagctactttgcttccccttccagaagaaggacttcagcacaattgtttagatattctggccgaggcacatgggacgcgccctgatttgacggatcagccactgcctgatgccgaccatacatggtatactggcggcagtagtcttcttcaagaggggcaacgcaaggcgggagcagccgtcactacggagaccgaagttatctgggccaaagcgttacccgcgggaacatccgcgcaacgtgcacagttaatcgctctgacacaggccctgaagatggcagagggcaaaaagttgaatgtctacaccaactcacgttatgcttttgcaacagcgcattggcatggcgaaatttaccgccgccgtggtctgctgactagtgagggtaaggaaattaaaaataaagatgagattcttgcgttgttaaaagctttattcttaccaaaacgcctttcgatcattcattgcccggggcatcaaaagggtcactcagcggaggctcgtggaaaccgtatggcggaccaagctgcccgtaaggcggcgatcacagagaccccggatacatcaacgctgttgatcgaaaacagctctccctacactagcgagcatttttaa

SEQ ID NO: 187 - DNA, 2115 bp, synthetic construct
  source 1..2115: mol_type = other DNA
atgggcagcagccatcatcatcatcatcacagcagcggcctggtgccgcgcggcagccatatgactttaaatattgaggatgagcatcgtttacatgagacatcaaaagaacccgacgtgagcttagggtcaacgtggctttctgacttcccccaggcgtgggcggagactggcggaatggggttagctgtccgccaagcaccgttgatcatcccgttaaaggcaacgtctacacctgtctctatcaaacagtaccccatgagtcgtgaggcccgcctggggattaagccacatattcgtcgcttgtatgaccaggggatcttggtcccatgtcaatctccgtggaacaccccccttcgtcccgtgaaaaagccaggtacaaacgattatcgtccagttcaagatcttcgcgaggtcaacaaacgcgtagaagacatccatccgactgtacctaatccttataatctgttatcaggcctgcccccatcgcaccaatggtatacagtattagacttgaaagacgcgttctttgcgctgagcctgcacccaacgtctcagccgctgtttgcgttcgaatggcgtgatcctgaaatgggaatttcgggtcagttaacctggactcgtctgccccagggctttaaaaacagccccacattgttcgatgaagcacttcaccgtgacttagcagacttccgtatccaacacccagacttaattctgttacagtatgttgacgaccttttgttggcggcaacgtctgaacttgactgtcagcaaggcacacgcgcgttattacaaacgttaggtaacttaggatatcgtgcgtccgcgaaaaaggcgcaaatttgtcaaaaacaggtaaagtaccttgggtatttgctgaaagaaggtcaacgttggattactgatgcgcgtaaggagaccgtaatggggcagcctacgcctaagacgccacgcgaattgcgtgaatttttgggcaaagcgggattctgtcgtttatggattcctgggttcgctgaaatggctgcacccctgtaccccttaacaaaaacagggacgcttttcaactgggggccagaccagcaaaaggcgtatcaggagatcaaacaagctttgttgaccgcacccgcgttgggtcttccggatttaaccaagccctttgagctgttcgttgatgaaaaacagggatatgcaaaaggagtattaacccaaaagttaggcccgtggcgtcgccctgttgcttacttgagtaaaaaattggatcctgtcgcagcaggatggccaccgtgcttgcgtatggtcgcggcaattgccgttttgacaaaggatgcaggtaagttgacgatgggtcaacccttaaacatcttggctccacatgctgtagaagcgttagtaaagcagcccccagaccgctggctttctaatgcgcgcatgacccactatcaggcgcttctgcttgatacggatcgtgtacaatttggaccagttgtagctttgaatccagctactttgcttccccttccagaagaaggacttcagcacaattgtttagatattctggccgaggcacatgggacgcgccctgatttgacggatcagccactgcctgatgccgaccatacatggtatactggcggcagtagtcttcttcaagaggggcaacgcaaggcgggagcagccgtcactacggagaccgaagttatctgggccaaagcgttacccgcgggaacatccgcgcaacgtgcacagttaatcgctctgacacaggccctgaagatggcagagggcaaaaagttgaatgtctacaccaactcacgttatgcttttgcaacagcgcattggcatggcgaaatttaccgccgccgtggtctgctgactagtgagggtaaggaaattaaaaataaagatgagattcttgcgttgttaaaagctttattcttaccaaaacgcctttcgatcattcattgcccggggcatcaaaagggtcactcagcggaggctcgtggaaaccgtatggcggaccaagctgcccgtaaggcggcgatcacagagaccccggatacatcaacgctgttgatcgaaaacagctctccctacactagcgagcatttttaa

SEQ ID NO: 188 - DNA, 2115 bp, synthetic construct
  source 1..2115: mol_type = other DNA
atgggcagcagccatcatcatcatcatcacagcagcggcctggtgccgcgcggcagccatatgactttaaatattgaggatgagcatcgtttacatgagacatcaaaagaacccgacgtgagcttagggtcaacgtggctttctgacttcccccaggcgtgggcggagactggcggaatggggttagctgtccgccaagcaccgttgatcatcccgttaaaggcaacgtctacacctgtctctatcaaacagtaccccatgagtcgtgaggcccgcctggggattaagccacatattcgtcgcttgtatgaccaggggatcttggtcccatgtcaatctccgtggaacaccccccttcgtcccgtgaaaaagccaggtacaaacgattatcgtccagttcaagatcttcgcgaggtcaacaaacgcgtagaagacatccatccgactgtacctaatccttataatctgttatcaggcctgcccccatcgcaccaatggtatacagtattagacttgaaagacgcgttctttgcgctgcgtctgcacccaacgtctcagccgctgtttgcgttcgaatgggaggatcctgaaatgggaatttcgggtcagttaacctggactcgtctgccccagggctttaaaaacagccccacattgttcgatgaagcacttcaccgtgacttagcagacttccgtatccaacacccagacttaattctgttacagtatgttgacgaccttttgttggcggcaacgtctgaacttgactgtcagcaaggcacacgcgcgttattacaaacgttaggtaacttaggatatcgtgcgtccgcgaaaaaggcgcaaatttgtcaaaaacaggtaaagtaccttgggtatttgctgaaagaaggtcaacgttggattactgatgcgcgtaaggagaccgtaatggggcagcctacgcctaagacgccacgcgaattgcgtgaatttttgggcaaagcgggattctgtcgtttatggattcctgggttcgctgaaatggctgcacccctgtaccccttaacaaaaacagggacgcttttcaactgggggccagaccagcaaaaggcgtatcaggagatcaaacaagctttgttgaccgcacccgcgttgggtcttccggatttaaccaagccctttgagctgttcgttgatgaaaaacagggatatgcaaaaggagtattaacccaaaagttaggcccgtggcgtcgccctgttgcttacttgagtaaaaaattggatcctgtcgcagcaggatggccaccgtgcttgcgtatggtcgcggcaattgccgttttgacaaaggatgcaggtaagttgacgatgggtcaacccttaaacatcttggctccacatgctgtagaagcgttagtaaagcagcccccagaccgctggctttctaatgcgcgcatgacccactatcaggcgcttctgcttgatacggatcgtgtacaatttggaccagttgtagctttgaatccagctactttgcttccccttccagaagaaggacttcagcacaattgtttagatattctggccgaggcacatgggacgcgccctgatttgacggatcagccactgcctgatgccgaccatacatggtatactggcggcagtagtcttcttcaagaggggcaacgcaaggcgggagcagccgtcactacggagaccgaagttatctgggccaaagcgttacccgcgggaacatccgcgcaacgtgcacagttaatcgctctgacacaggccctgaagatggcagagggcaaaaagttgaatgtctacaccaactcacgttatgcttttgcaacagcgcattggcatggcgaaatttaccgccgccgtggtctgctgactagtgagggtaaggaaattaaaaataaagatgagattcttgcgttgttaaaagctttattcttaccaaaacgcctttcgatcattcattgcccggggcatcaaaagggtcactcagcggaggctcgtggaaaccgtatggcggaccaagctgcccgtaaggcggcgatcacagagaccccggatacatcaacgctgttgatcgaaaacagctctccctacactagcgagcatttttaa

SEQ ID NO: 189 - DNA, 2115 bp, synthetic construct
  source 1..2115: mol_type = other DNA
atgggcagcagccatcatcatcatcatcacagcagcggcctggtgccgcgcggcagccatatgactttaaatattgaggatgagcatcgtttacatgagacatcaaaagaacccgacgtgagcttagggtcaacgtggctttctgacttcccccaggcgtgggcggagactggcggaatggggttagctgtccgccaagcaccgttgatcatcccgttaaaggcaacgtctacacctgtctctatcaaacagtaccccatgagtcgtgaggcccgcctggggattaagccacatattcgtcgcttgtatgaccaggggatcttggtcccatgtcaatctccgtggaacaccccccttcgtcccgtgaaaaagccaggtacaaacgattatcgtccagttcaagatcttcgcgaggtcaacaaacgcgtagaagacatccatccgactgtacctaatccttataatctgttatcaggcctgcccccatcgcaccaatggtatacagtattagacttgaaagacgcgttctttgcgctgcgtctgcacccaacgtctcagccgctgtttgcgttcgaatggcgtgatcctgaaatgggaatttcgggtcagttaacctggactcgtctgccccagggctttaaaaacagccccacattgttcgatgaagcacttcaccgtgacttagcagacttccgtatccaacacccagacttaattctgttacagtatgttgacgaccttttgttggcggcaacgtctgaacttgactgtcagcaaggcacacgcgcgttattacaaacgttaggtaacttaggatatcgtgcgtccgcgaaaaaggcgcaaatttgtcaaaaacaggtaaagtaccttgggtatttgctgaaagaaggtcaacgttggattactgatgcgcgtaaggaggatgtaatggggcagcctacgcctaagacgccacgcgaattgcgtgaatttttgggcaaagcgggattctgtcgtttatggattcctgggttcgctgaaatggctgcacccctgtaccccttaacaaaaacagggacgcttttcaactgggggccagaccagcaaaaggcgtatcaggagatcaaacaagctttgttgaccgcacccgcgttgggtcttccggatttaaccaagccctttgagctgttcgttgatgaaaaacagggatatgcaaaaggagtattaacccaaaagttaggcccgtggcgtcgccctgttgcttacttgagtaaaaaattggatcctgtcgcagcaggatggccaccgtgcttgcgtatggtcgcggcaattgccgttttgacaaaggatgcaggtaagttgacgatgggtcaacccttaaacatcttggctccacatgctgtagaagcgttagtaaagcagcccccagaccgctggctttctaatgcgcgcatgacccactatcaggcgcttctgcttgatacggatcgtgtacaatttggaccagttgtagctttgaatccagctactttgcttccccttccagaagaaggacttcagcacaattgtttagatattctggccgaggcacatgggacgcgccctgatttgacggatcagccactgcctgatgccgaccatacatggtatactggcggcagtagtcttcttcaagaggggcaacgcaaggcgggagcagccgtcactacggagaccgaagttatctgggccaaagcgttacccgcgggaacatccgcgcaacgtgcacagttaatcgctctgacacaggccctgaagatggcagagggcaaaaagttgaatgtctacaccaactcacgttatgcttttgcaacagcgcattggcatggcgaaatttaccgccgccgtggtctgctgactagtgagggtaaggaaattaaaaataaagatgagattcttgcgttgttaaaagctttattcttaccaaaacgcctttcgatcattcattgcccggggcatcaaaagggtcactcagcggaggctcgtggaaaccgtatggcggaccaagctgcccgtaaggcggcgatcacagagaccccggatacatcaacgctgttgatcgaaaacagctctccctacactagcgagcatttttaa

SEQ ID NO: 190 - DNA, 2115 bp, synthetic construct
  source 1..2115: mol_type = other DNA
atgggcagcagccatcatcatcatcatcacagcagcggcctggtgccgcgcggcagccatatgactttaaatattgaggatgagcatcgtttacatgagacatcaaaagaacccgacgtgagcttagggtcaacgtggctttctgacttcccccaggcgtgggcggagactggcggaatggggttagctgtccgccaagcaccgttgatcatcccgttaaaggcaacgtctacacctgtctctatcaaacagtaccccatgagtcgtgaggcccgcctggggattaagccacatattcgtcgcttgtatgaccaggggatcttggtcccatgtcaatctccgtggaacaccccccttcgtcccgtgaaaaagccaggtacaaacgattatcgtccagttcaagatcttcgcgaggtcaacaaacgcgtagaagacatccatccgactgtacctaatccttataatctgttatcaggcctgcccccatcgcaccaatggtatacagtattagacttgaaagacgcgttctttgcgctgcgtctgcacccaacgtctcagccgctgtttgcgttcgaatggcgtgatcctgaaatgggaatttcgggtcagttaacctggactcgtctgccccagggctttaaaaacagccccacattgttcgatgaagcacttcaccgtgacttagcagacttccgtatccaacacccagacttaattctgttacagtatgttgacgaccttttgttggcggcaacgtctgaacttgactgtcagcaaggcacacgcgcgttattacaaacgttaggtaacttaggatatcgtgcgtccgcgaaaaaggcgcaaatttgtcaaaaacaggtaaagtaccttgggtatttgctgaaagaaggtcaacgttggattactgatgcgcgtaaggagaccgtaatggggcagcctacgcctaagacgccacgcgaattgcgtgaatttttgggcaaagcgggattctgtcgtttatggattcctgggttcgctgaaatggctgcacccctgtaccccttaacaaaaacagggacggagttcaactgggggccagaccagcaaaaggcgtatcaggagatcaaacaagctttgttgaccgcacccgcgttgggtcttccggatttaaccaagccctttgagctgttcgttgatgaaaaacagggatatgcaaaaggagtattaacccaaaagttaggcccgtggcgtcgccctgttgcttacttgagtaaaaaattggatcctgtcgcagcaggatggccaccgtgcttgcgtatggtcgcggcaattgccgttttgacaaaggatgcaggtaagttgacgatgggtcaacccttaaacatcttggctccacatgctgtagaagcgttagtaaagcagcccccagaccgctggctttctaatgcgcgcatgacccactatcaggcgcttctgcttgatacggatcgtgtacaatttggaccagttgtagctttgaatccagctactttgcttccccttccagaagaaggacttcagcacaattgtttagatattctggccgaggcacatgggacgcgccctgatttgacggatcagccactgcctgatgccgaccatacatggtatactggcggcagtagtcttcttcaagaggggcaacgcaaggcgggagcagccgtcactacggagaccgaagttatctgggccaaagcgttacccgcgggaacatccgcgcaacgtgcacagttaatcgctctgacacaggccctgaagatggcagagggcaaaaagttgaatgtctacaccaactcacgttatgcttttgcaacagcgcattggcatggcgaaatttaccgccgccgtggtctgctgactagtgagggtaaggaaattaaaaataaagatgagattcttgcgttgttaaaagctttattcttaccaaaacgcctttcgatcattcattgcccggggcatcaaaagggtcactcagcggaggctcgtggaaaccgtatggcggaccaagctgcccgtaaggcggcgatcacagagaccccggatacatcaacgctgttgatcgaaaacagctctccctacactagcgagcatttttaa

SEQ ID NO: 191 - DNA, 2115 bp, synthetic construct
  source 1..2115: mol_type = other DNA
atgggcagcagccatcatcatcatcatcacagcagcggcctggtgccgcgcggcagccatatgactttaaatattgaggatgagcatcgtttacatgagacatcaaaagaacccgacgtgagcttagggtcaacgtggctttctgacttcccccaggcgtgggcggagactggcggaatggggttagctgtccgccaagcaccgttgatcatcccgttaaaggcaacgtctacacctgtctctatcaaacagtaccccatgagtcgtgaggcccgcctggggattaagccacatattcgtcgcttgtatgaccaggggatcttggtcccatgtcaatctccgtggaacaccccccttcgtcccgtgaaaaagccaggtacaaacgattatcgtccagttcaagatcttcgcgaggtcaacaaacgcgtagaagacatccatccgactgtacctaatccttataatctgttatcaggcctgcccccatcgcaccaatggtatacagtattagacttgaaagacgcgttctttgcgctgcgtctgcacccaacgtctcagccgctgtttgcgttcgaatggcgtgatcctgaaatgggaatttcgggtcagttaacctggactcgtctgccccagggctttaaaaacagccccacattgttcgatgaagcacttcaccgtgacttagcagacttccgtatccaacacccagacttaattctgttacagtatgttgacgaccttttgttggcggcaacgtctgaacttgactgtcagcaaggcacacgcgcgttattacaaacgttaggtaacttaggatatcgtgcgtccgcgaaaaaggcgcaaatttgtcaaaaacaggtaaagtaccttgggtatttgctgaaagaaggtcaacgttggattactgatgcgcgtaaggagaccgtaatggggcagcctacgcctaagacgccacgcgaattgcgtgaatttttgggcaaagcgggattctgtcgtttatggattcctgggttcgctgaaatggctgcacccctgtaccccttaacaaaaacagggacgcttttcaactgggggccagaccagcaaaaggcgtatcaggagatcaaacaagctttgttgaccgcacccgcgttgggtcttccggatttaaccaagccctttgagctgttcgttgatgaaaaacagggatatgcaaaaggagtattaacccaaaagttaggcccgtggcgtcgccctgttgcttacttgagtaaaaaattggatcctgtcgcagcaggatggccaccgtgcttgcgtatggtcgcggcaattgccgttttgacaaaggatgcaggtaagttgacgatgggtcaacccttaacaatcttggctccacatgctgtagaagcgttagtaaagcagcccccagaccgctggctttctaatgcgcgcatgacccactatcaggcgcttctgcttgatacggatcgtgtacaatttggaccagttgtagctttgaatccagctactttgcttccccttccagaagaaggacttcagcacaattgtttagatattctggccgaggcacatgggacgcgccctgatttgacggatcagccactgcctgatgccgaccatacatggtatactggcggcagtagtcttcttcaagaggggcaacgcaaggcgggagcagccgtcactacggagaccgaagttatctgggccaaagcgttacccgcgggaacatccgcgcaacgtgcacagttaatcgctctgacacaggccctgaagatggcagagggcaaaaagttgaatgtctacaccaactcacgttatgcttttgcaacagcgcattggcatggcgaaatttaccgccgccgtggtctgctgactagtgagggtaaggaaattaaaaataaagatgagattcttgcgttgttaaaagctttattcttaccaaaacgcctttcgatcattcattgcccggggcatcaaaagggtcactcagcggaggctcgtggaaaccgtatggcggaccaagctgcccgtaaggcggcgatcacagagaccccggatacatcaacgctgttgatcgaaaacagctctccctacactagcgagcatttttaa

SEQ ID NO: 192 - DNA, 2115 bp, synthetic construct
  source 1..2115: mol_type = other DNA
atgggcagcagccatcatcatcatcatcacagcagcggcctggtgccgcgcggcagccatatgactttaaatattgaggatgagcatcgtttacatgagacatcaaaagaacccgacgtgagcttagggtcaacgtggctttctgacttcccccaggcgtgggcggagactggcggaatggggttagctgtccgccaagcaccgttgatcatcccgttaaaggcaacgtctacacctgtctctatcaaacagtaccccatgagtcgtgaggcccgcctggggattaagccacatattcgtcgcttgtatgaccaggggatcttggtcccatgtcaatctccgtggaacaccccccttcgtcccgtgaaaaagccaggtacaaacgattatcgtccagttcaagatcttcgcgaggtcaacaaacgcgtagaagacatccatccgactgtacctaatccttataatctgttatcaggcctgcccccatcgcaccaatggtatacagtattagacttgaaagacgcgttctttgcgctgcgtctgcacccaacgtctcagccgctgtttgcgttcgaatggcgtgatcctgaaatgggaatttcgggtcagttaacctggactcgtctgccccagggctttaaaaacagccccacattgttcgatgaagcacttcaccgtgacttagcagacttccgtatccaacacccagacttaattctgttacagtatgttgacgaccttttgttggcggcaacgtctgaacttgactgtcagcaaggcacacgcgcgttattacaaacgttaggtaacttaggatatcgtgcgtccgcgaaaaaggcgcaaatttgtcaaaaacaggtaaagtaccttgggtatttgctgaaagaaggtcaacgttggattactgatgcgcgtaaggagaccgtaatggggcagcctacgcctaagacgccacgcgaattgcgtgaatttttgggcaaagcgggattctgtcgtttatggattcctgggttcgctgaaatggctgcacccctgtaccccttaacaaaaacagggacgcttttcaactgggggccagaccagcaaaaggcgtatcaggagatcaaacaagctttgttgaccgcacccgcgttgggtcttccggatttaaccaagccctttgagctgttcgttgatgaaaaacagggatatgcaaaaggagtattaacccaaaagttaggcccgtggcgtcgccctgttgcttacttgagtaaaaaattggatcctgtcgcagcaggatggccaccgtgcttgcgtatggtcgcggcaattgccgttttgacaaaggatgcaggtaagttgacgatgggtcaacccttaaacatccatgctccacatgctgtagaagcgttagtaaagcagcccccagaccgctggctttctaatgcgcgcatgacccactatcaggcgcttctgcttgatacggatcgtgtacaatttggaccagttgtagctttgaatccagctactttgcttccccttccagaagaaggacttcagcacaattgtttagatattctggccgaggcacatgggacgcgccctgatttgacggatcagccactgcctgatgccgaccatacatggtatactggcggcagtagtcttcttcaagaggggcaacgcaaggcgggagcagccgtcactacggagaccgaagttatctgggccaaagcgttacccgcgggaacatccgcgcaacgtgcacagttaatcgctctgacacaggccctgaagatggcagagggcaaaaagttgaatgtctacaccaactcacgttatgcttttgcaacagcgcattggcatggcgaaatttaccgccgccgtggtctgctgactagtgagggtaaggaaattaaaaataaagatgagattcttgcgttgttaaaagctttattcttaccaaaacgcctttcgatcattcattgcccggggcatcaaaagggtcactcagcggaggctcgtggaaaccgtatggcggaccaagctgcccgtaaggcggcgatcacagagaccccggatacatcaacgctgttgatcgaaaacagctctccctacactagcgagcatttttaa

SEQ ID NO: 193 - DNA, 2115 bp, synthetic construct
  source 1..2115: mol_type = other DNA
atgggcagcagccatcatcatcatcatcacagcagcggcctggtgccgcgcggcagccatatgactttaaatattgaggatgagcatcgtttacatgagacatcaaaagaacccgacgtgagcttagggtcaacgtggctttctgacttcccccaggcgtgggcggagactggcggaatggggttagctgtccgccaagcaccgttgatcatcccgttaaaggcaacgtctacacctgtctctatcaaacagtaccccatgagtcgtgaggcccgcctggggattaagccacatattcgtcgcttgtatgaccaggggatcttggtcccatgtcaatctccgtggaacaccccccttcgtcccgtgaaaaagccaggtacaaacgattatcgtccagttcaagatcttcgcgaggtcaacaaacgcgtagaagacatccatccgactgtacctaatccttataatctgttatcaggcctgcccccatcgcaccaatggtatacagtattagacttgaaagacgcgttctttgcgctgcgtctgcacccaacgtctcagccgctgtttgcgttcgaatggcgtgatcctgaaatgggaatttcgggtcagttaacctggactcgtctgccccagggctttaaaaacagccccacattgttcgatgaagcacttcaccgtgacttagcagacttccgtatccaacacccagacttaattctgttacagtatgttgacgaccttttgttggcggcaacgtctgaacttgactgtcagcaaggcacacgcgcgttattacaaacgttaggtaacttaggatatcgtgcgtccgcgaaaaaggcgcaaatttgtcaaaaacaggtaaagtaccttgggtatttgctgaaagaaggtcaacgttggattactgatgcgcgtaaggagaccgtaatggggcagcctacgcctaagacgccacgcgaattgcgtgaatttttgggcaaagcgggattctgtcgtttatggattcctgggttcgctgaaatggctgcacccctgtaccccttaacaaaaacagggacgcttttcaactgggggccagaccagcaaaaggcgtatcaggagatcaaacaagctttgttgaccgcacccgcgttgggtcttccggatttaaccaagccctttgagctgttcgttgatgaaaaacagggatatgcaaaaggagtattaacccaaaagttaggcccgtggcgtcgccctgttgcttacttgagtaaaaaattggatcctgtcgcagcaggatggccaccgtgcttgcgtatggtcgcggcaattgccgttttgacaaaggatgcaggtaagttgacgatgggtcaacccttaaacatcttggctccacatgctgtagaagcgttagtaaagcagcccccagaccgctggctttctaatgcgcgcatgacccactatcaggcgcttctgcttgataacgatcgtgtacaatttggaccagttgtagctttgaatccagctactttgcttccccttccagaagaaggacttcagcacaattgtttagatattctggccgaggcacatgggacgcgccctgatttgacggatcagccactgcctgatgccgaccatacatggtatactggcggcagtagtcttcttcaagaggggcaacgcaaggcgggagcagccgtcactacggagaccgaagttatctgggccaaagcgttacccgcgggaacatccgcgcaacgtgcacagttaatcgctctgacacaggccctgaagatggcagagggcaaaaagttgaatgtctacaccaactcacgttatgcttttgcaacagcgcattggcatggcgaaatttaccgccgccgtggtctgctgactagtgagggtaaggaaattaaaaataaagatgagattcttgcgttgttaaaagctttattcttaccaaaacgcctttcgatcattcattgcccggggcatcaaaagggtcactcagcggaggctcgtggaaaccgtatggcggaccaagctgcccgtaaggcggcgatcacagagaccccggatacatcaacgctgttgatcgaaaacagctctccctacactagcgagcatttttaa

SEQ ID NO: 194 - DNA, 2115 bp, synthetic construct
  source 1..2115: mol_type = other DNA
atgggcagcagccatcatcatcatcatcacagcagcggcctggtgccgcgcggcagccatatgactttaaatattgaggatgagcatcgtttacatgagacatcaaaagaacccgacgtgagcttagggtcaacgtggctttctgacttcccccaggcgtgggcggagactggcggaatggggttagctgtccgccaagcaccgttgatcatcccgttaaaggcaacgtctacacctgtctctatcaaacagtaccccatgagtcgtgaggcccgcctggggattaagccacatattcgtcgcttgtatgaccaggggatcttggtcccatgtcaatctccgtggaacaccccccttcgtcccgtgaaaaagccaggtacaaacgattatcgtccagttcaagatcttcgcgaggtcaacaaacgcgtagaagacatccatccgactgtacctaatccttataatctgttatcaggcctgcccccatcgcaccaatggtatacagtattagacttgaaagacgcgttctttgcgctgcgtctgcacccaacgtctcagccgctgtttgcgttcgaatggcgtgatcctgaaatgggaatttcgggtcagttaacctggactcgtctgccccagggctttaaaaacagccccacattgttcgatgaagcacttcaccgtgacttagcagacttccgtatccaacacccagacttaattctgttacagtatgttgacgaccttttgttggcggcaacgtctgaacttgactgtcagcaaggcacacgcgcgttattacaaacgttaggtaacttaggatatcgtgcgtccgcgaaaaaggcgcaaatttgtcaaaaacaggtaaagtaccttgggtatttgctgaaagaaggtcaacgttggattactgatgcgcgtaaggagaccgtaatggggcagcctacgcctaagacgccacgcgaattgcgtgaatttttgggcaaagcgggattctgtcgtttatggattcctgggttcgctgaaatggctgcacccctgtaccccttaacaaaaacagggacgcttttcaactgggggccagaccagcaaaaggcgtatcaggagatcaaacaagctttgttgaccgcacccgcgttgggtcttccggatttaaccaagccctttgagctgttcgttgatgaaaaacagggatatgcaaaaggagtattaacccaaaagttaggcccgtggcgtcgccctgttgcttacttgagtaaaaaattggatcctgtcgcagcaggatggccaccgtgcttgcgtatggtcgcggcaattgccgttttgacaaaggatgcaggtaagttgacgatgggtcaacccttaaacatcttggctccacatgctgtagaagcgttagtaaagcagcccccagaccgctggctttctaatgcgcgcatgacccactatcaggcgcttctgcttgatacggatcgtgtacaatttggaccagttgtagctttgaatccagctactttgcttccccttccagaagaagcgcttcagcacaattgtttagatattctggccgaggcacatgggacgcgccctgatttgacggatcagccactgcctgatgccgaccatacatggtatactggcggcagtagtcttcttcaagaggggcaacgcaaggcgggagcagccgtcactacggagaccgaagttatctgggccaaagcgttacccgcgggaacatccgcgcaacgtgcacagttaatcgctctgacacaggccctgaagatggcagagggcaaaaagttgaatgtctacaccaactcacgttatgcttttgcaacagcgcattggcatggcgaaatttaccgccgccgtggtctgctgactagtgagggtaaggaaattaaaaataaagatgagattcttgcgttgttaaaagctttattcttaccaaaacgcctttcgatcattcattgcccggggcatcaaaagggtcactcagcggaggctcgtggaaaccgtatggcggaccaagctgcccgtaaggcggcgatcacagagaccccggatacatcaacgctgttgatcgaaaacagctctccctacactagcgagcatttttaa

SEQ ID NO: 195 - DNA, 2115 bp, synthetic construct; identical to SEQ ID NO: 194
  source 1..2115: mol_type = other DNA

SEQ ID NO: 196 - DNA, 1569 bp, synthetic construct
  source 1..1569: mol_type = other DNA
atgggcagcagccatcatcatcatcatcacagcagcggcctggtgccgcgcggcagccatatgactttaaatattgaggatgagcatcgtttacatgagacatcaaaagaacccgacgtgagcttagggtcaacgtggctttctgacttcccccaggcgtgggcggagactggcggaatggggttagctgtccgccaagcaccgttgatcatcccgttaaaggcaacgtctacacctgtctctatcaaacagtaccccatgagtcgtgaggcccgcctggggattaagccacatattcgtcgcttgtatgaccaggggatcttggtcccatgtcaatctccgtggaacaccccccttcgtcccgtgaaaaagccaggtacaaacgattatcgtccagttcaagatcttcgcgaggtcaacaaacgcgtagaagacatccatccgactgtacctaatccttataatctgttatcaggcctgcccccatcgcaccaatggtatacagtattagacttgaaagacgcgttctttgcgctgcgtctgcacccaacgtctcagccgctgtttgcgttcgaatggcgtgatcctgaaatgggaatttcgggtcagttaacctggactcgtctgccccagggctttaaaaacagccccacattgttcgatgaagcacttcaccgtgacttagcagacttccgtatccaacacccagacttaattctgttacagtatgttgacgaccttttgttggcggcaacgtctgaacttgactgtcagcaaggcacacgcgcgttattacaaacgttaggtaacttaggatatcgtgcgtccgcgaaaaaggcgcaaatttgtcaaaaacaggtaaagtaccttgggtatttgctgaaagaaggtcaacgttggattactgatgcgcgtaaggagaccgtaatggggcagcctacgcctaagacgccacgcgaattgcgtgaatttttgggcaaagcgggattctgtcgtttatggattcctgggttcgctgaaatggctgcacccctgtaccccttaacaaaaacagggacgcttttcaactgggggccagaccagcaaaaggcgtatcaggagatcaaacaagctttgttgaccgcacccgcgttgggtcttccggatttaaccaagccctttgagctgttcgttgatgaaaaacagggatatgcaaaaggagtattaacccaaaagttaggcccgtggcgtcgccctgttgcttacttgagtaaaaaattggatcctgtcgcagcaggatggccaccgtgcttgcgtatggtcgcggcaattgccgttttgacaaaggatgcaggtaagttgacgatgggtcaacccttaaacatcttggctccacatgctgtagaagcgttagtaaagcagcccccagaccgctggctttctaatgcgcgcatgacccactatcaggcgcttctgcttgatacggatcgtgtacaatttggaccagttgtagctttgaatccagctactttgcttccccttccagaagaaggacttcagcacaattgtttagatattctggccgagtaa

SEQ ID NO: 197 - DNA, 2115 bp, synthetic construct
  source 1..2115: mol_type = other DNA
atgggcagcagccatcatcatcatcatcacagcagcggcctggtgccgcgcggcagccatatgactttaaatattgaggatgagcatcgtttacatgagacatcaaaagaacccgacgtgagcttagggtcaacgtggctttctgacttcccccaggcgtgggcggagactggcggaatggggttagctgtccgccaagcaccgttgatcatcccgttaaaggcaacgtctacacctgtctctatcaaacagtaccccatgagtcgtgaggcccgcctggggattaagccacatattcgtcgcttgtatgaccaggggatcttggtcccatgtcaatctccgtggaacaccccccttcgtcccgtgaaaaagccaggtacaaacgattatcgtccagttcaagatcttcgcgaggtcaacaaacgcgtagaagacatccatccgactgtacctaatccttataatctgttatcaggcctgcccccatcgcaccaatggtatacagtattagacttgaaagacgcgttctttgcgctgcgtctgcacccaacgtctcagccgctgtttgcgttcgaatggcgtgatcctgaaatgggaatttcgggtcagttaacctggactcgtctgccccagggctttaaaaacagccccacattgttcgatgaagcacttcaccgtgacttagcagacttccgtatccaacacccagacttaattctgttacagtatgttgacgaccttttgttggcggcaacgtctgaacttgactgtcagcaaggcacacgcgcgttattacaaacgttaggtaacttaggatatcgtgcgtccgcgaaaaaggcgcaaatttgtcaaaaacaggtaaagtaccttgggtatttgctgaaagaaggtcaacgttggattactgatgcgcgtaaggagaccgtaatggggcagcctacgcctaagacgccacgcgaattgcgtgaatttttgggcaaagcgggattctgtcgtttatggattcctgggttcgctgaaatggctgcacccctgtaccccttaacaaaaacagggacgcttttcaactgggggccagaccagcaaaaggcgtatcaggagatcaaacaagctttgttgaccgcacccgcgttgggtcttccggatttaaccaagccctttgagctgttcgttgatgaaaaacagggatatgcaaaaggagtattaacccaaaagttaggcccgtggcgtcgccctgttgcttacttgagtaaaaaattggatcctgtcgcagcaggatggccaccgtgcttgcgtatggtcgcggcaattgccgttttgacaaaggatgcaggtaagttgacgatgggtcaacccttaaacatcttggctccacatgctgtagaagcgttagtaaagcagcccccagaccgctggctttctaatgcgcgcatgacccactatcaggcgcttctgcttgatacggatcgtgtacaatttggaccagttgtagctttgaatccagctactttgcttccccttccagaagaaggacttcagcacaattgtttagatattctggccgaggcacatgggacgcgccctgatttgacggatcagccactgcctgatgccgaccatacatggtatactggcggcagtagttatcttcaagaggggcaacgcaaggcgggagcagccgtcactacggagaccgaagttatctgggccaaagcgttacccgcgggaacatccgcgcaacgtgcacagttaatcgctctgacacaggccctgaagatggcagagggcaaaaagttgaatgtctacaccaactcacgttatgcttttgcaacagcgcattggcatggcgaaatttaccgccgccgtggtctgctgactagtgagggtaaggaaattaaaaataaagatgagattcttgcgttgttaaaagctttattcttaccaaaacgcctttcgatcattcattgcccggggcatcaaaagggtcactcagcggaggctcgtggaaaccgtatggcggaccaagctgcccgtaaggcggcgatcacagagaccccggatacatcaacgctgttgatcgaaaacagctctccctacactagcgagcatttttaa

SEQ ID NO: 198 - DNA, 2115 bp, synthetic construct
  source 1..2115: mol_type = other DNA
atgggcagcagccatcatcatcatcatcacagcagcggcctggtgccgcgcggcagccatatgactttaaatattgaggatgagcatcgtttacatgagacatcaaaagaacccgacgtgagcttagggtcaacgtggctttctgacttcccccaggcgtgggcggagactggcggaatggggttagctgtccgccaagcaccgttgatcatcccgttaaaggcaacgtctacacctgtctctatcaaacagtaccccatgagtcgtgaggcccgcctggggattaagccacatattcgtcgcttgtatgaccaggggatcttggtcccatgtcaatctccgtggaacaccccccttcgtcccgtgaaaaagccaggtacaaacgattatcgtccagttcaagatcttcgcgaggtcaacaaacgcgtagaagacatccatccgactgtacctaatccttataatctgttatcaggcctgcccccatcgcaccaatggtatacagtattagacttgaaagacgcgttctttgcgctgcgtctgcacccaacgtctcagccgctgtttgcgttcgaatggcgtgatcctgaaatgggaatttcgggtcagttaacctggactcgtctgccccagggctttaaaaacagccccacattgttcgatgaagcacttcaccgtgacttagcagacttccgtatccaacacccagacttaattctgttacagtatgttgacgaccttttgttggcggcaacgtctgaacttgactgtcagcaaggcacacgcgcgttattacaaacgttaggtaacttaggatatcgtgcgtccgcgaaaaaggcgcaaatttgtcaaaaacaggtaaagtaccttgggtatttgctgaaagaaggtcaacgttggattactgatgcgcgtaaggagaccgtaatggggcagcctacgcctaagacgccacgcgaattgcgtgaatttttgggcaaagcgggattctgtcgtttatggattcctgggttcgctgaaatggctgcacccctgtaccccttaacaaaaacagggacgcttttcaactgggggccagaccagcaaaaggcgtatcaggagatcaaacaagctttgttgaccgcacccgcgttgggtcttccggatttaaccaagccctttgagctgttcgttgatgaaaaacagggatatgcaaaaggagtattaacccaaaagttaggcccgtggcgtcgccctgttgcttacttgagtaaaaaattggatcctgtcgcagcaggatggccaccgtgcttgcgtatggtcgcggcaattgccgttttgacaaaggatgcaggtaagttgacgatgggtcaacccttaaacatcttggctccacatgctgtagaagcgttagtaaagcagcccccagaccgctggctttctaatgcgcgcatgacccactatcaggcgcttctgcttgatacggatcgtgtacaatttggaccagttgtagctttgaatccagctactttgcttccccttccagaagaaggacttcagcacaattgtttagatattctggccgaggcacatgggacgcgccctgatttgacggatcagccactgcctgatgccgaccatacatggtatactggcggcagtagtcttcttcaagaggggcaacgcaaggcgggagcagccgtcactacggagaccgaagttatctgggccaaagcgttacccgcgggaacatccgcgcaacgtgcacagttaatcgctctgacacaggccctgaagatggcagagggcaaaaagttgaatgtctacaccaactcacgttatgcttttgcaacagcgcattggcatggcgaaatttaccgccgccgtggtctgctgactagtgagggtaaggaaattaaaaataaagatgagattcttgcgttgttaaaagctttattcttaccaaaaatgctttcgatcattcattgcccggggcatcaaaagggtcactcagcggaggctcgtggaaaccgtatggcggaccaagctgcccgtaaggcggcgatcacagagaccccggatacatcaacgctgttgatcgaaaacagctctccctacactagcgagcatttttaa

SEQ ID NO: 199 - DNA, 2115 bp, synthetic construct
  source 1..2115: mol_type = other DNA
atgggcagcagccatcatcatcatcatcacagcagcggcctggtgccgcgcggcagccatatgactttaaatattgaggatgagcatcgtttacatgagacatcaaaagaacccgacgtgagcttagggtcaacgtggctttctgacttcccccaggcgtgggcggagactggcggaatggggttagctgtccgccaagcaccgttgatcatcccgttaaaggcaacgtctacacctgtctctatcaaacagtaccccatgagtcgtgaggcccgcctggggattaagccacatattcgtcgcttgtatgaccaggggatcttggtcccatgtcaatctccgtggaacaccccccttcgtcccgtgaaaaagccaggtacaaacgattatcgtccagttcaagatcttcgcgaggtcaacaaacgcgtagaagacatccatccgactgtacctaatccttataatctgttatcaggcctgcccccatcgcaccaatggtatacagtattagacttgaaagacgcgttctttgcgctgcgtctgcacccaacgtctcagccgctgtttgcgttcgaatggcgtgatcctgaaatgggaatttcgggtcagttaacctggactcgtctgccccagggctttaaaaacagccccacattgttcgatgaagcacttcaccgtgacttagcagacttccgtatccaacacccagacttaattctgttacagtatgttgacgaccttttgttggcggcaacgtctgaacttgactgtcagcaaggcacacgcgcgttattacaaacgttaggtaacttaggatatcgtgcgtccgcgaaaaaggcgcaaatttgtcaaaaacaggtaaagtaccttgggtatttgctgaaagaaggtcaacgttggattactgatgcgcgtaaggagaccgtaatggggcagcctacgcctaagacgccacgcgaattgcgtgaatttttgggcaaagcgggattctgtcgtttatggattcctgggttcgctgaaatggctgcacccctgtaccccttaacaaaaacagggacgcttttcaactgggggccagaccagcaaaaggcgtatcaggagatcaaacaagctttgttgaccgcacccgcgttgggtcttccggatttaaccaagccctttgagctgttcgttgatgaaaaacagggatatgcaaaaggagtattaacccaaaagttaggcccgtggcgtcgccctgttgcttacttgagtaaaaaattggatcctgtcgcagcaggatggccaccgtgcttgcgtatggtcgcggcaattgccgttttgacaaaggatgcaggtaagttgacgatgggtcaacccttaaacatcttggctccacatgctgtagaagcgttagtaaagcagcccccagaccgctggctttctaatgcgcgcatgacccactatcaggcgcttctgcttgatacggatcgtgtacaatttggaccagttgtagctttgaatccagctactttgcttccccttccagaagaaggacttcagcacaattgtttagatattctggccgaggcacatgggacgcgccctgatttgacggatcagccactgcctgatgccgaccatacatggtatactggcggcagtagtcttcttcaagaggggcaacgcaaggcgggagcagccgtcactacggagaccgaagttatctgggccaaagcgttacccgcgggaacatccgcgcaacgtgcacagttaatcgctctgacacaggccctgaagatggcagagggcaaaaagttgaatgtctacaccaactcacgttatgcttttgcaacagcgcattggcatggcgaaatttaccgccgccgtggtctgctgactagtgagggtaaggaaattaaaaataaagatgagattcttgcgttgttaaaagctttattcttaccaaaacgcctttcgatcattcattgcccggggcatcaaaagggtcactcagcggaggtacgtggaaaccgtatggcggaccaagctgcccgtaaggcggcgatcacagagaccccggatacatcaacgctgttgatcgaaaacagctctccctacactagcgagcatttttaa

SEQ ID NO: 200 - DNA, 2115 bp, synthetic construct
  source 1..2115: mol_type = other DNA
atgggcagcagccatcatcatcatcatcacagcagcggcctggtgccgcgcggcagccatatgactttaaatattgaggatgagcatgcgttacatgagacatcaaaagaacccgacgtgagcttagggtcaacgtggctttctgacttcccccaggcgtgggcggagactggcggaatggggttagctgtccgccaagcaccgttgatcatcccgttaaaggcaacgtctacacctgtctctatcaaacagtaccccatgagtcgtgaggcccgcctggggattaagccacatattcgtcgcttgtatgaccaggggatcttggtcccatgtcaatctccgtggaacaccccccttcgtcccgtgaaaaagccaggtacaaacgattatcgtccagttcaagatcttcgcgaggtcaacaaacgcgtagaagacatccatccgactgtacctaatccttataatctgttatcaggcctgcccccatcgcaccaatggtatacagtattagacttgaaagacgcgttcttttgcctgcccctgcacccaacgtctcagccgctgtttgcgttcgaatggcgtgatcctgaaatgggaatttcgggtcagttaacctggactcgtctgccccagggctttaaaaacagccccacattgttcgatgaagcacttcaccgtgacttagcagacttccgtatccaacacccagacttaattctgttacagtatgttgacgaccttttgttggcggcaacgtctgaacttgactgtcagcaaggcacacgcgcgttattacaaacgttaggtaacttaggatatcgtgcgtccgcgaaaaaggcgcaaatttgtcaaaaacaggtaaagtaccttgggtatttgctgaaagaaggtcaacgttggattactgatgcgcgtaaggagaccgtaatggggcagcctacgcctaagacgccacgcgaattgcgtgaatttttgggcaaagcgggattctgtcgtttatggattcctgggttcgctgaaatggctgcacccctgtaccccttaacaaaaacagggacgcttttcaactgggggccagaccagcaaaaggcgtatcaggagatcaaacaagctttgttgaccgcacccgcgttgggtcttccggatttaaccaagccctttgagctgttcgttgatgaaaaacagggatatgcaaaaggagtattaacccaaaagttaggcccgtggcgtcgccctgttgcttacttgagtaaaaaattggatcctgtcgcagcaggatggccaccgtgcttgcgtatggtcgcggcaattgccgttttgacaaaggatgcaggtaagttgacgatgggtcaacccttaaacatcttggctccacatgctgtagaagcgttagtaaagcagcccccagaccgctggctttctaatgcgcgcatgacccactatcaggcgcttctgcttgatacggatcgtgtacaatttggaccagttgtagctttgaatccagctactttgcttccccttccagaagaaggacttcagcacaattgtttagatattctggccgaggcacatgggacgcgccctgatttgacggatcagccactgcctgatgccgaccatacatggtatactggcggcagtagtcttcttcaagaggggcaacgcaaggcgggagcagccgtcactacggagaccgaagttatctgggccaaagcgttacccgcgggaacatccgcgcaacgtgcacagttaatcgctctgacacaggccctgaagatggcagagggcaaaaagttgaatgtctacaccaactcacgttatgcttttgcaacagcgcattggcatggcgaaatttaccgccgccgtggtctgctgactagtgagggtaaggaaattaaaaataaagatgagattcttgcgttgttaaaagctttattcttaccaaaacgcctttcgatcattcattgcccggggcatcaaaagggtcactcagcggaggctcgtggaaaccgtatggcggaccaagctgcccgtaaggcggcgatcacagagaccccggatacatcaacgctgttgatcgaaaacagctctccctacactagcgagcatttttaa

SEQ ID NO: 201 - DNA, 2115 bp, synthetic construct
  source 1..2115: mol_type = other DNA
atgggcagcagccatcatcatcatcatcacagcagcggcctggtgccgcgcggcagccatatgactttaaatattgaggatgagcatgcgttacatgagacatcaaaagaacccgacgtgagcttagggtcaacgtggctttctgacttcccccaggcgtgggcggagactggcggaatggggttagctgtccgccaagcaccgttgatcatcccgttaaaggcaacgtctacacctgtctctatcaaacagtaccccatgagtcgtgaggcccgcctggggattaagccacatattcgtcgcttgtatgaccaggggatcttggtcccatgtcaatctccgtggaacaccccccttcgtcccgtgaaaaagccaggtacaaacgattatcgtccagttcaagatcttcgcgaggtcaacaaacgcgtagaagacatccatccgactgtacctaatccttataatctgttatcaggcctgcccccatcgcaccaatggtatacagtattagacttgaaagacgcgttcttttgcctgtctctgcacccaacgtctcagccgctgtttgcgttcgaatggcgtgatcctgaaatgggaatttcgggtcagttaacctggactcgtctgccccagggctttaaaaacagccccacattgttcgatgaagcacttcaccgtgacttagcagacttccgtatccaacacccagacttaattctgttacagtatgttgacgaccttttgttggcggcaacgtctgaacttgactgtcagcaaggcacacgcgcgttattacaaacgttaggtaacttaggatatcgtgcgtccgcgaaaaaggcgcaaatttgtcaaaaacaggtaaagtaccttgggtatttgctgaaagaaggtcaacgttggattactgatgcgcgtaaggagaccgtaatggggcagcctacgcctaagacgccacgcgaattgcgtgaatttttgggcaaagcgggattctgtcgtttatggattcctgggttcgctgaaatggctgcacccctgtaccccttaacaaaaacagggacgcttttcaactgggggccagaccagcaaaaggcgtatcaggagatcaaacaagctttgttgaccgcacccgcgttgggtcttccggatttaaccaagccctttgagctgttcgttgatgaaaaacagggatatgcaaaaggagtattaacccaaaagttaggcccgtggcgtcgccctgttgcttacttgagtaaaaaattggatcctgtcgcagcaggatggccaccgtgcttgcgtatggtcgcggcaattgccgttttgacaaaggatgcaggtaagttgacgatgggtcaacccttaaacatcttggctccacatgctgtagaagcgttagtaaagcagcccccagaccgctggctttctaatgcgcgcatgacccactatcaggcgcttctgcttgatacggatcgtgtacaatttggaccagttgtagctttgaatccagctactttgcttccccttccagaagaaggacttcagcacaattgtttagatattctggccgaggcacatgggacgcgccctgatttgacggatcagccactgcctgatgccgaccatacatggtatactggcggcagtagtcttcttcaagaggggcaacgcaaggcgggagcagccgtcactacggagaccgaagttatctgggccaaagcgttacccgcgggaacatccgcgcaacgtgcacagttaatcgctctgacacaggccctgaagatggcagagggcaaaaagttgaatgtctacaccaactcacgttatgcttttgcaacagcgcattggcatggcgaaatttaccgccgccgtggtctgctgactagtgagggtaaggaaattaaaaataaagatgagattcttgcgttgttaaaagctttattcttaccaaaacgcctttcgatcattcattgcccggggcatcaaaagggtcactcagcggaggctcgtggaaaccgtatggcggaccaagctgcccgtaaggcggcgatcacagagaccccggatacatcaacgctgttgatcgaaaacagctctccctacactagcgagcatttttaa

SEQ ID NO: 202 - DNA, 2115 bp, synthetic construct
  source 1..2115: mol_type = other DNA
atgggcagcagccatcatcatcatcatcacagcagcggcctggtgccgcgcggcagccatatgactttaaatattgaggatgagcatgcgttacatgagacatcaaaagaacccgacgtgagcttagggtcaacgtggctttctgacttcccccaggcgtgggcggagactggcggaatggggttagctgtccgccaagcaccgttgatcatcccgttaaaggcaacgtctacacctgtctctatcaaacagtaccccatgagtcgtgaggcccgcctggggattaagccacatattcgtcgcttgtatgaccaggggatcttggtcccatgtcaatctccgtggaacaccccccttcgtcccgtgaaaaagccaggtacaaacgattatcgtccagttcaagatcttcgcgaggtcaacaaacgcgtagaagacatccatccgactgtacctaatccttataatctgttatcaggcctgcccccatcgcaccaatggtatacagtattagacttgaaagacgcgttcttttgcctgcgtctgcacccaacgtctcagccgctgtttgcgttcgaatgggaggatcctgaaatgggaatttcgggtcagttaacctggactcgtctgccccagggctttaaaaacagccccacattgttcgatgaagcacttcaccgtgacttagcagacttccgtatccaacacccagacttaattctgttacagtatgttgacgaccttttgttggcggcaacgtctgaacttgactgtcagcaaggcacacgcgcgttattacaaacgttaggtaacttaggatatcgtgcgtccgcgaaaaaggcgcaaatttgtcaaaaacaggtaaagtaccttgggtatttgctgaaagaaggtcaacgttggattactgatgcgcgtaaggagaccgtaatggggcagcctacgcctaagacgccacgcgaattgcgtgaatttttgggcaaagcgggattctgtcgtttatggattcctgggttcgctgaaatggctgcacccctgtaccccttaacaaaaacagggacgcttttcaactgggggccagaccagcaaaaggcgtatcaggagatcaaacaagctttgttgaccgcacccgcgttgggtcttccggatttaaccaagccctttgagctgttcgttgatgaaaaacagggatatgcaaaaggagtattaacccaaaagttaggcccgtggcgtcgccctgttgcttacttgagtaaaaaattggatcctgtcgcagcaggatggccaccgtgcttgcgtatggtcgcggcaattgccgttttgacaaaggatgcaggtaagttgacgatgggtcaacccttaaacatcttggctccacatgctgtagaagcgttagtaaagcagcccccagaccgctggctttctaatgcgcgcatgacccactatcaggcgcttctgcttgatacggatcgtgtacaatttggaccagttgtagctttgaatccagctactttgcttccccttccagaagaaggacttcagcacaattgtttagatattctggccgaggcacatgggacgcgccctgatttgacggatcagccactgcctgatgccgaccatacatggtatactggcggcagtagtcttcttcaagaggggcaacgcaaggcgggagcagccgtcactacggagaccgaagttatctgggccaaagcgttacccgcgggaacatccgcgcaacgtgcacagttaatcgctctgacacaggccctgaagatggcagagggcaaaaagttgaatgtctacaccaactcacgttatgcttttgcaacagcgcattggcatggcgaaatttaccgccgccgtggtctgctgactagtgagggtaaggaaattaaaaataaagatgagattcttgcgttgttaaaagctttattcttaccaaaacgcctttcgatcattcattgcccggggcatcaaaagggtcactcagcggaggctcgtggaaaccgtatggcggaccaagctgcccgtaaggcggcgatcacagagaccccggatacatcaacgctgttgatcgaaaacagctctccctacactagcgagcatttttaa

SEQ ID NO: 203 - DNA, 2115 bp, synthetic construct
  source 1..2115: mol_type = other DNA
atgggcagcagccatcatcatcatcatcacagcagcggcctggtgccgcgcggcagccatatgactttaaatattgaggatgagcatgcgttacatgagacatcaaaagaacccgacgtgagcttagggtcaacgtggctttctgacttcccccaggcgtgggcggagactggcggaatggggttagctgtccgccaagcaccgttgatcatcccgttaaaggcaacgtctacacctgtctctatcaaacagtaccccatgagtcgtgaggcccgcctggggattaagccacatattcgtcgcttgtatgaccaggggatcttggtcccatgtcaatctccgtggaacaccccccttcgtcccgtgaaaaagccaggtacaaacgattatcgtccagttcaagatcttcgcgaggtcaacaaacgcgtagaagacatccatccgactgtacctaatccttataatctgttatcaggcctgcccccatcgcaccaatggtatacagtattagacttgaaagacgcgttcttttgcctgcgtctgcacccaacgtctcagccgctgtttgcgttcgaatggcgtgatcctgaaatgggaatttcgggtcagttaacctggactcgtctgccccagggctttaaaaacagccccacattgttcgatgaagcacttcaccgtgacttagcagacttccgtatccaacacccagacttaattctgttacagtatgttgacgaccttttgttggcggcaacgtctgaacttgactgtcagcaaggcacacgcgcgttattacaaacgttaggtaacttaggatatcgtgcgtccgcgaaaaaggcgcaaatttgtcaaaaacaggtaaagtaccttgggtatttgctgaaagaaggtcaacgttggattactgatgcgcgtaaggaggatgtaatggggcagcctacgcctaagacgccacgcgaattgcgtgaatttttgggcaaagcgggattctgtcgtttatggattcctgggttcgctgaaatggctgcacccctgtaccccttaacaaaaacagggacgcttttcaactgggggccagaccagcaaaaggcgtatcaggagatcaaacaagctttgttgaccgcacccgcgttgggtcttccggatttaaccaagccctttgagctgttcgttgatgaaaaacagggatatgcaaaaggagtattaacccaaaagttaggcccgtggcgtcgccctgttgcttacttgagtaaaaaattggatcctgtcgcagcaggatggccaccgtgcttgcgtatggtcgcggcaattgccgttttgacaaaggatgcaggtaagttgacgatgggtcaacccttaaacatcttggctccacatgctgtagaagcgttagtaaagcagcccccagaccgctggctttctaatgcgcgcatgacccactatcaggcgcttctgcttgatacggatcgtgtacaatttggaccagttgtagctttgaatccagctactttgcttccccttccagaagaaggacttcagcacaattgtttagatattctggccgaggcacatgggacgcgccctgatttgacggatcagccactgcctgatgccgaccatacatggtatactggcggcagtagtcttcttcaagaggggcaacgcaaggcgggagcagccgtcactacggagaccgaagttatctgggccaaagcgttacccgcgggaacatccgcgcaacgtgcacagttaatcgctctgacacaggccctgaagatggcagagggcaaaaagttgaatgtctacaccaactcacgttatgcttttgcaacagcgcattggcatggcgaaatttaccgccgccgtggtctgctgactagtgagggtaaggaaattaaaaataaagatgagattcttgcgttgttaaaagctttattcttaccaaaacgcctttcgatcattcattgcccggggcatcaaaagggtcactcagcggaggctcgtggaaaccgtatggcggaccaagctgcccgtaaggcggcgatcacagagaccccggatacatcaacgctgttgatcgaaaacagctctccctacactagcgagcatttttaa

SEQ ID NO: 204 - DNA, 2115 bp, synthetic construct
  source 1..2115: mol_type = other DNA
atgggcagcagccatcatcatcatcatcacagcagcggcctggtgccgcgcggcagccatatgactttaaatattgaggatgagcatgcgttacatgagacatcaaaagaacccgacgtgagcttagggtcaacgtggctttctgacttcccccaggcgtgggcggagactggcggaatggggttagctgtccgccaagcaccgttgatcatcccgttaaaggcaacgtctacacctgtctctatcaaacagtaccccatgagtcgtgaggcccgcctggggattaagccacatattcgtcgcttgtatgaccaggggatcttggtcccatgtcaatctccgtggaacaccccccttcgtcccgtgaaaaagccaggtacaaacgattatcgtccagttcaagatcttcgcgaggtcaacaaacgcgtagaagacatccatccgactgtacctaatccttataatctgttatcaggcctgcccccatcgcaccaatggtatacagtattagacttgaaagacgcgttcttttgcctgcgtctgcacccaacgtctcagccgctgtttgcgttcgaatggcgtgatcctgaaatgggaatttcgggtcagttaacctggactcgtctgccccagggctttaaaaacagccccacattgttcgatgaagcacttcaccgtgacttagcagacttccgtatccaacacccagacttaattctgttacagtatgttgacgaccttttgttggcggcaacgtctgaacttgactgtcagcaaggcacacgcgcgttattacaaacgttaggtaacttaggatatcgtgcgtccgcgaaaaaggcgcaaatttgtcaaaaacaggtaaagtaccttgggtatttgctgaaagaaggtcaacgttggattactgatgcgcgtaaggagaccgtaatggggcagcctacgcctaagacgccacgcgaattgcgtgaatttttgggcaaagcgggattctgtcgtttatggattcctgggttcgctgaaatggctgcacccctgtaccccttaacaaaaacagggacggagttcaactgggggccagaccagcaaaaggcgtatcaggagatcaaacaagctttgttgaccgcacccgcgttgggtcttccggatttaaccaagccctttgagctgttcgttgatgaaaaacagggatatgcaaaaggagtattaacccaaaagttaggcccgtggcgtcgccctgttgcttacttgagtaaaaaattggatcctgtcgcagcaggatggccaccgtgcttgcgtatggtcgcggcaattgccgttttgacaaaggatgcaggtaagttgacgatgggtcaacccttaaacatcttggctccacatgctgtagaagcgttagtaaagcagcccccagaccgctggctttctaatgcgcgcatgacccactatcaggcgcttctgcttgatacggatcgtgtacaatttggaccagttgtagctttgaatccagctactttgcttccccttccagaagaaggacttcagcacaattgtttagatattctggccgaggcacatgggacgcgccctgatttgacggatcagccactgcctgatgccgaccatacatggtatactggcggcagtagtcttcttcaagaggggcaacgcaaggcgggagcagccgtcactacggagaccgaagttatctgggccaaagcgttacccgcgggaacatccgcgcaacgtgcacagttaatcgctctgacacaggccctgaagatggcagagggcaaaaagttgaatgtctacaccaactcacgttatgcttttgcaacagcgcattggcatggcgaaatttaccgccgccgtggtctgctgactagtgagggtaaggaaattaaaaataaagatgagattcttgcgttgttaaaagctttattcttaccaaaacgcctttcgatcattcattgcccggggcatcaaaagggtcactcagcggaggctcgtggaaaccgtatggcggaccaagctgcccgtaaggcggcgatcacagagaccccggatacatcaacgctgttgatcgaaaacagctctccctacactagcgagcatttttaa

SEQ ID NO: 205 - DNA, 2115 bp, synthetic construct
  source 1..2115: mol_type = other DNA
atgggcagcagccatcatcatcatcatcacagcagcggcctggtgccgcgcggcagccatatgactttaaatattgaggatgagcatgcgttacatgagacatcaaaagaacccgacgtgagcttagggtcaacgtggctttctgacttcccccaggcgtgggcggagactggcggaatggggttagctgtccgccaagcaccgttgatcatcccgttaaaggcaacgtctacacctgtctctatcaaacagtaccccatgagtcgtgaggcccgcctggggattaagccacatattcgtcgcttgtatgaccaggggatcttggtcccatgtcaatctccgtggaacaccccccttcgtcccgtgaaaaagccaggtacaaacgattatcgtccagttcaagatcttcgcgaggtcaacaaacgcgtagaagacatccatccgactgtacctaatccttataatctgttatcaggcctgcccccatcgcaccaatggtatacagtattagacttgaaagacgcgttcttttgcctgcgtctgcacccaacgtctcagccgctgtttgcgttcgaatggcgtgatcctgaaatgggaatttcgggtcagttaacctggactcgtctgccccagggctttaaaaacagccccacattgttcgatgaagcacttcaccgtgacttagcagacttccgtatccaacacccagacttaattctgttacagtatgttgacgaccttttgttggcggcaacgtctgaacttgactgtcagcaaggcacacgcgcgttattacaaacgttaggtaacttaggatatcgtgcgtccgcgaaaaaggcgcaaatttgtcaaaaacaggtaaagtaccttgggtatttgctgaaagaaggtcaacgttggattactgatgcgcgtaaggagaccgtaatggggcagcctacgcctaagacgccacgcgaattgcgtgaatttttgggcaaagcgggattctgtcgtttatggattcctgggttcgctgaaatggctgcacccctgtaccccttaacaaaaacagggacgcttttcaactgggggccagaccagcaaaaggcgtatcaggagatcaaacaagctttgttgaccgcacccgcgttgggtcttccggatttaaccaagccctttgagctgttcgttgatgaaaaacagggatatgcaaaaggagtattaacccaaaagttaggcccgtggcgtcgccctgttgcttacttgagtaaaaaattggatcctgtcgcagcaggatggccaccgtgcttgcgtatggtcgcggcaattgccgttttgacaaaggatgcaggtaagttgacgatgggtcaacccttaacaatcttggctccacatgctgtagaagcgttagtaaagcagcccccagaccgctggctttctaatgcgcgcatgacccactatcaggcgcttctgcttgatacggatcgtgtacaatttggaccagttgtagctttgaatccagctactttgcttccccttccagaagaaggacttcagcacaattgtttagatattctggccgaggcacatgggacgcgccctgatttgacggatcagccactgcctgatgccgaccatacatggtatactggcggcagtagtcttcttcaagaggggcaacgcaaggcgggagcagccgtcactacggagaccgaagttatctgggccaaagcgttacccgcgggaacatccgcgcaacgtgcacagttaatcgctctgacacaggccctgaagatggcagagggcaaaaagttgaatgtctacaccaactcacgttatgcttttgcaacagcgcattggcatggcgaaatttaccgccgccgtggtctgctgactagtgagggtaaggaaattaaaaataaagatgagattcttgcgttgttaaaagctttattcttaccaaaacgcctttcgatcattcattgcccggggcatcaaaagggtcactcagcggaggctcgtggaaaccgtatggcggaccaagctgcccgtaaggcggcgatcacagagaccccggatacatcaacgctgttgatcgaaaacagctctccctacactagcgagcatttttaa

SEQ ID NO: 206 - DNA, 2115 bp, synthetic construct
  source 1..2115: mol_type = other DNA
atgggcagcagccatcatcatcatcatcacagcagcggcctggtgccgcgcggcagccatatgactttaaatattgaggatgagcatgcgttacatgagacatcaaaagaacccgacgtgagcttagggtcaacgtggctttctgacttcccccaggcgtgggcggagactggcggaatggggttagctgtccgccaagcaccgttgatcatcccgttaaaggcaacgtctacacctgtctctatcaaacagtaccccatgagtcgtgaggcccgcctggggattaagccacatattcgtcgcttgtatgaccaggggatcttggtcccatgtcaatctccgtggaacaccccccttcgtcccgtgaaaaagccaggtacaaacgattatcgtccagttcaagatcttcgcgaggtcaacaaacgcgtagaagacatccatccgactgtacctaatccttataatctgttatcaggcctgcccccatcgcaccaatggtatacagtattagacttgaaagacgcgttcttttgcctgcgtctgcacccaacgtctcagccgctgtttgcgttcgaatggcgtgatcctgaaatgggaatttcgggtcagttaacctggactcgtctgccccagggctttaaaaacagccccacattgttcgatgaagcacttcaccgtgacttagcagacttccgtatccaacacccagacttaattctgttacagtatgttgacgaccttttgttggcggcaacgtctgaacttgactgtcagcaaggcacacgcgcgttattacaaacgttaggtaacttaggatatcgtgcgtccgcgaaaaaggcgcaaatttgtcaaaaacaggtaaagtaccttgggtatttgctgaaagaaggtcaacgttggattactgatgcgcgtaaggagaccgtaatggggcagcctacgcctaagacgccacgcgaattgcgtgaatttttgggcaaagcgggattctgtcgtttatggattcctgggttcgctgaaatggctgcacccctgtaccccttaacaaaaacagggacgcttttcaactgggggccagaccagcaaaaggcgtatcaggagatcaaacaagctttgttgaccgcacccgcgttgggtcttccggatttaaccaagccctttgagctgttcgttgatgaaaaacagggatatgcaaaaggagtattaacccaaaagttaggcccgtggcgtcgccctgttgcttacttgagtaaaaaattggatcctgtcgcagcaggatggccaccgtgcttgcgtatggtcgcggcaattgccgttttgacaaaggatgcaggtaagttgacgatgggtcaacccttaaacatccatgctccacatgctgtagaagcgttagtaaagcagcccccagaccgctggctttctaatgcgcgcatgacccactatcaggcgcttctgcttgatacggatcgtgtacaatttggaccagttgtagctttgaatccagctactttgcttccccttccagaagaaggacttcagcacaattgtttagatattctggccgaggcacatgggacgcgccctgatttgacggatcagccactgcctgatgccgaccatacatggtatactggcggcagtagtcttcttcaagaggggcaacgcaaggcgggagcagccgtcactacggagaccgaagttatctgggccaaagcgttacccgcgggaacatccgcgcaacgtgcacagttaatcgctctgacacaggccctgaagatggcagagggcaaaaagttgaatgtctacaccaactcacgttatgcttttgcaacagcgcattggcatggcgaaatttaccgccgccgtggtctgctgactagtgagggtaaggaaattaaaaataaagatgagattcttgcgttgttaaaagctttattcttaccaaaacgcctttcgatcattcattgcccggggcatcaaaagggtcactcagcggaggctcgtggaaaccgtatggcggaccaagctgcccgtaaggcggcgatcacagagaccccggatacatcaacgctgttgatcgaaaacagctctccctacactagcgagcatttttaa

SEQ ID NO: 207 - DNA, 2115 bp, synthetic construct
  source 1..2115: mol_type = other DNA
atgggcagcagccatcatcatcatcatcacagcagcggcctggtgccgcgcggcagccatatgactttaaatattgaggatgagcatgcgttacatgagacatcaaaagaacccgacgtgagcttagggtcaacgtggctttctgacttcccccaggcgtgggcggagactggcggaatggggttagctgtccgccaagcaccgttgatcatcccgttaaaggcaacgtctacacctgtctctatcaaacagtaccccatgagtcgtgaggcccgcctggggattaagccacatattcgtcgcttgtatgaccaggggatcttggtcccatgtcaatctccgtggaacaccccccttcgtcccgtgaaaaagccaggtacaaacgattatcgtccagttcaagatcttcgcgaggtcaacaaacgcgtagaagacatccatccgactgtacctaatccttataatctgttatcaggcctgcccccatcgcaccaatggtatacagtattagacttgaaagacgcgttcttttgcctgcgtctgcacccaacgtctcagccgctgtttgcgttcgaatggcgtgatcctgaaatgggaatttcgggtcagttaacctggactcgtctgccccagggctttaaaaacagccccacattgttcgatgaagcacttcaccgtgacttagcagacttccgtatccaacacccagacttaattctgttacagtatgttgacgaccttttgttggcggcaacgtctgaacttgactgtcagcaaggcacacgcgcgttattacaaacgttaggtaacttaggatatcgtgcgtccgcgaaaaaggcgcaaatttgtcaaaaacaggtaaagtaccttgggtatttgctgaaagaaggtcaacgttggattactgatgcgcgtaaggagaccgtaatggggcagcctacgcctaagacgccacgcgaattgcgtgaatttttgggcaaagcgggattctgtcgtttatggattcctgggttcgctgaaatggctgcacccctgtaccccttaacaaaaacagggacgcttttcaactgggggccagaccagcaaaaggcgtatcaggagatcaaacaagctttgttgaccgcacccgcgttgggtcttccggatttaaccaagccctttgagctgttcgttgatgaaaaacagggatatgcaaaaggagtattaacccaaaagttaggcccgtggcgtcgccctgttgcttacttgagtaaaaaattggatcctgtcgcagcaggatggccaccgtgcttgcgtatggtcgcggcaattgccgttttgacaaaggatgcaggtaagttgacgatgggtcaacccttaaacatcttggctccacatgctgtagaagcgttagtaaagcagcccccagaccgctggctttctaatgcgcgcatgacccactatcaggcgcttctgcttgataacgatcgtgtacaatttggaccagttgtagctttgaatccagctactttgcttccccttccagaagaaggacttcagcacaattgtttagatattctggccgaggcacatgggacgcgccctgatttgacggatcagccactgcctgatgccgaccatacatggtatactggcggcagtagtcttcttcaagaggggcaacgcaaggcgggagcagccgtcactacggagaccgaagttatctgggccaaagcgttacccgcgggaacatccgcgcaacgtgcacagttaatcgctctgacacaggccctgaagatggcagagggcaaaaagttgaatgtctacaccaactcacgttatgcttttgcaacagcgcattggcatggcgaaatttaccgccgccgtggtctgctgactagtgagggtaaggaaattaaaaataaagatgagattcttgcgttgttaaaagctttattcttaccaaaacgcctttcgatcattcattgcccggggcatcaaaagggtcactcagcggaggctcgtggaaaccgtatggcggaccaagctgcccgtaaggcggcgatcacagagaccccggatacatcaacgctgttgatcgaaaacagctctccctacactagcgagcatttttaa

SEQ ID NO: 208 - DNA, 2115 bp, synthetic construct
  source 1..2115: mol_type = other DNA
atgggcagcagccatcatcatcatcatcacagcagcggcctggtgccgcgcggcagccatatgactttaaatattgaggatgagcatgcgttacatgagacatcaaaagaacccgacgtgagcttagggtcaacgtggctttctgacttcccccaggcgtgggcggagactggcggaatggggttagctgtccgccaagcaccgttgatcatcccgttaaaggcaacgtctacacctgtctctatcaaacagtaccccatgagtcgtgaggcccgcctggggattaagccacatattcgtcgcttgtatgaccaggggatcttggtcccatgtcaatctccgtggaacaccccccttcgtcccgtgaaaaagccaggtacaaacgattatcgtccagttcaagatcttcgcgaggtcaacaaacgcgtagaagacatccatccgactgtacctaatccttataatctgttatcaggcctgcccccatcgcaccaatggtatacagtattagacttgaaagacgcgttcttttgcctgcgtctgcacccaacgtctcagccgctgtttgcgttcgaatggcgtgatcctgaaatgggaatttcgggtcagttaacctggactcgtctgccccagggctttaaaaacagccccacattgttcgatgaagcacttcaccgtgacttagcagacttccgtatccaacacccagacttaattctgttacagtatgttgacgaccttttgttggcggcaacgtctgaacttgactgtcagcaaggcacacgcgcgttattacaaacgttaggtaacttaggatatcgtgcgtccgcgaaaaaggcgcaaatttgtcaaaaacaggtaaagtaccttgggtatttgctgaaagaaggtcaacgttggattactgatgcgcgtaaggagaccgtaatggggcagcctacgcctaagacgccacgcgaattgcgtgaatttttgggcaaagcgggattctgtcgtttatggattcctgggttcgctgaaatggctgcacccctgtaccccttaacaaaaacagggacgcttttcaactgggggccagaccagcaaaaggcgtatcaggagatcaaacaagctttgttgaccgcacccgcgttgggtcttccggatttaaccaagccctttgagctgttcgttgatgaaaaacagggatatgcaaaaggagtattaacccaaaagttaggcccgtggcgtcgccctgttgcttacttgagtaaaaaattggatcctgtcgcagcaggatggccaccgtgcttgcgtatggtcgcggcaattgccgttttgacaaaggatgcaggtaagttgacgatgggtcaacccttaaacatcttggctccacatgctgtagaagcgttagtaaagcagcccccagaccgctggctttctaatgcgcgcatgacccactatcaggcgcttctgcttgatacggatcgtgtacaatttggaccagttgtagctttgaatccagctactttgcttccccttccagaagaagcgcttcagcacaattgtttagatattctggccgaggcacatgggacgcgccctgatttgacggatcagccactgcctgatgccgaccatacatggtatactggcggcagtagtcttcttcaagaggggcaacgcaaggcgggagcagccgtcactacggagaccgaagttatctgggccaaagcgttacccgcgggaacatccgcgcaacgtgcacagttaatcgctctgacacaggccctgaagatggcagagggcaaaaagttgaatgtctacaccaactcacgttatgcttttgcaacagcgcattggcatggcgaaatttaccgccgccgtggtctgctgactagtgagggtaaggaaattaaaaataaagatgagattcttgcgttgttaaaagctttattcttaccaaaacgcctttcgatcattcattgcccggggcatcaaaagggtcactcagcggaggctcgtggaaaccgtatggcggaccaagctgcccgtaaggcggcgatcacagagaccccggatacatcaacgctgttgatcgaaaacagctctccctacactagcgagcatttttaa

SEQ ID NO: 209 - DNA, 1569 bp, synthetic construct
  source 1..1569: mol_type = other DNA
atgggcagcagccatcatcatcatcatcacagcagcggcctggtgccgcgcggcagccatatgactttaaatattgaggatgagcatgcgttacatgagacatcaaaagaacccgacgtgagcttagggtcaacgtggctttctgacttcccccaggcgtgggcggagactggcggaatggggttagctgtccgccaagcaccgttgatcatcccgttaaaggcaacgtctacacctgtctctatcaaacagtaccccatgagtcgtgaggcccgcctggggattaagccacatattcgtcgcttgtatgaccaggggatcttggtcccatgtcaatctccgtggaacaccccccttcgtcccgtgaaaaagccaggtacaaacgattatcgtccagttcaagatcttcgcgaggtcaacaaacgcgtagaagacatccatccgactgtacctaatccttataatctgttatcaggcctgcccccatcgcaccaatggtatacagtattagacttgaaagacgcgttcttttgcctgcgtctgcacccaacgtctcagccgctgtttgcgttcgaatggcgtgatcctgaaatgggaatttcgggtcagttaacctggactcgtctgccccagggctttaaaaacagccccacattgttcgatgaagcacttcaccgtgacttagcagacttccgtatccaacacccagacttaattctgttacagtatgttgacgaccttttgttggcggcaacgtctgaacttgactgtcagcaaggcacacgcgcgttattacaaacgttaggtaacttaggatatcgtgcgtccgcgaaaaaggcgcaaatttgtcaaaaacaggtaaagtaccttgggtatttgctgaaagaaggtcaacgttggattactgatgcgcgtaaggagaccgtaatggggcagcctacgcctaagacgccacgcgaattgcgtgaatttttgggcaaagcgggattctgtcgtttatggattcctgggttcgctgaaatggctgcacccctgtaccccttaacaaaaacagggacgcttttcaactgggggccagaccagcaaaaggcgtatcaggagatcaaacaagctttgttgaccgcacccgcgttgggtcttccggatttaaccaagccctttgagctgttcgttgatgaaaaacagggatatgcaaaaggagtattaacccaaaagttaggcccgtggcgtcgccctgttgcttacttgagtaaaaaattggatcctgtcgcagcaggatggccaccgtgcttgcgtatggtcgcggcaattgccgttttgacaaaggatgcaggtaagttgacgatgggtcaacccttaaacatcttggctccacatgctgtagaagcgttagtaaagcagcccccagaccgctggctttctaatgcgcgcatgacccactatcaggcgcttctgcttgatacggatcgtgtacaatttggaccagttgtagctttgaatccagctactttgcttccccttccagaagaaggacttcagcacaattgtttagatattctggccgagtaa

SEQ ID NO: 210 - DNA, 2115 bp, synthetic construct
  source 1..2115: mol_type = other DNA
atgggcagcagccatcatcatcatcatcacagcagcggcctggtgccgcgcggcagccatatgactttaaatattgaggatgagcatgcgttacatgagacatcaaaagaacccgacgtgagcttagggtcaacgtggctttctgacttcccccaggcgtgggcggagactggcggaatggggttagctgtccgccaagcaccgttgatcatcccgttaaaggcaacgtctacacctgtctctatcaaacagtaccccatgagtcgtgaggcccgcctggggattaagccacatattcgtcgcttgtatgaccaggggatcttggtcccatgtcaatctccgtggaacaccccccttcgtcccgtgaaaaagccaggtacaaacgattatcgtccagttcaagatcttcgcgaggtcaacaaacgcgtagaagacatccatccgactgtacctaatccttataatctgttatcaggcctgcccccatcgcaccaatggtatacagtattagacttgaaagacgcgttcttttgcctgcgtctgcacccaacgtctcagccgctgtttgcgttcgaatggcgtgatcctgaaatgggaatttcgggtcagttaacctggactcgtctgccccagggctttaaaaacagccccacattgttcgatgaagcacttcaccgtgacttagcagacttccgtatccaacacccagacttaattctgttacagtatgttgacgaccttttgttggcggcaacgtctgaacttgactgtcagcaaggcacacgcgcgttattacaaacgttaggtaacttaggatatcgtgcgtccgcgaaaaaggcgcaaatttgtcaaaaacaggtaaagtaccttgggtatttgctgaaagaaggtcaacgttggattactgatgcgcgtaaggagaccgtaatggggcagcctacgcctaagacgccacgcgaattgcgtgaatttttgggcaaagcgggattctgtcgtttatggattcctgggttcgctgaaatggctgcacccctgtaccccttaacaaaaacagggacgcttttcaactgggggccagaccagcaaaaggcgtatcaggagatcaaacaagctttgttgaccgcacccgcgttgggtcttccggatttaaccaagccctttgagctgttcgttgatgaaaaacagggatatgcaaaaggagtattaacccaaaagttaggcccgtggcgtcgccctgttgcttacttgagtaaaaaattggatcctgtcgcagcaggatggccaccgtgcttgcgtatggtcgcggcaattgccgttttgacaaaggatgcaggtaagttgacgatgggtcaacccttaaacatcttggctccacatgctgtagaagcgttagtaaagcagcccccagaccgctggctttctaatgcgcgcatgacccactatcaggcgcttctgcttgatacggatcgtgtacaatttggaccagttgtagctttgaatccagctactttgcttccccttccagaagaaggacttcagcacaattgtttagatattctggccgaggcacatgggacgcgccctgatttgacggatcagccactgcctgatgccgaccatacatggtatactggcggcagtagttatcttcaagaggggcaacgcaaggcgggagcagccgtcactacggagaccgaagttatctgggccaaagcgttacccgcgggaacatccgcgcaacgtgcacagttaatcgctctgacacaggccctgaagatggcagagggcaaaaagttgaatgtctacaccaactcacgttatgcttttgcaacagcgcattggcatggcgaaatttaccgccgccgtggtctgctgactagtgagggtaaggaaattaaaaataaagatgagattcttgcgttgttaaaagctttattcttaccaaaacgcctttcgatcattcattgcccggggcatcaaaagggtcactcagcggaggctcgtggaaaccgtatggcggaccaagctgcccgtaaggcggcgatcacagagaccccggatacatcaacgctgttgatcgaaaacagctctccctacactagcgagcatttttaa

SEQ ID NO: 211 - DNA, 2115 bp, synthetic construct
  source 1..2115: mol_type = other DNA
atgggcagcagccatcatcatcatcatcacagcagcggcctggtgccgcgcggcagccatatgactttaaatattgaggatgagcatgcgttacatgagacatcaaaagaacccgacgtgagcttagggtcaacgtggctttctgacttcccccaggcgtgggcggagactggcggaatggggttagctgtccgccaagcaccgttgatcatcccgttaaaggcaacgtctacacctgtctctatcaaacagtaccccatgagtcgtgaggcccgcctggggattaagccacatattcgtcgcttgtatgaccaggggatcttggtcccatgtcaatctccgtggaacaccccccttcgtcccgtgaaaaagccaggtacaaacgattatcgtccagttcaagatcttcgcgaggtcaacaaacgcgtagaagacatccatccgactgtacctaatccttataatctgttatcaggcctgcccccatcgcaccaatggtatacagtattagacttgaaagacgcgttcttttgcctgcgtctgcacccaacgtctcagccgctgtttgcgttcgaatggcgtgatcctgaaatgggaatttcgggtcagttaacctggactcgtctgccccagggctttaaaaacagccccacattgttcgatgaagcacttcaccgtgacttagcagacttccgtatccaacacccagacttaattctgttacagtatgttgacgaccttttgttggcggcaacgtctgaacttgactgtcagcaaggcacacgcgcgttattacaaacgttaggtaacttaggatatcgtgcgtccgcgaaaaaggcgcaaatttgtcaaaaacaggtaaagtaccttgggtatttgctgaaagaaggtcaacgttggattactgatgcgcgtaaggagaccgtaatggggcagcctacgcctaagacgccacgcgaattgcgtgaatttttgggcaaagcgggattctgtcgtttatggattcctgggttcgctgaaatggctgcacccctgtaccccttaacaaaaacagggacgcttttcaactgggggccagaccagcaaaaggcgtatcaggagatcaaacaagctttgttgaccgcacccgcgttgggtcttccggatttaaccaagccctttgagctgttcgttgatgaaaaacagggatatgcaaaaggagtattaacccaaaagttaggcccgtggcgtcgccctgttgcttacttgagtaaaaaattggatcctgtcgcagcaggatggccaccgtgcttgcgtatggtcgcggcaattgccgttttgacaaaggatgcaggtaagttgacgatgggtcaacccttaaacatcttggctccacatgctgtagaagcgttagtaaagcagcccccagaccgctggctttctaatgcgcgcatgacccactatcaggcgcttctgcttgatacggatcgtgtacaatttggaccagttgtagctttgaatccagctactttgcttccccttccagaagaaggacttcagcacaattgtttagatattctggccgaggcacatgggacgcgccctgatttgacggatcagccactgcctgatgccgaccatacatggtatactggcggcagtagtcttcttcaagaggggcaacgcaaggcgggagcagccgtcactacggagaccgaagttatctgggccaaagcgttacccgcgggaacatccgcgcaacgtgcacagttaatcgctctgacacaggccctgaagatggcagagggcaaaaagttgaatgtctacaccaactcacgttatgcttttgcaacagcgcattggcatggcgaaatttaccgccgccgtggtctgctgactagtgagggtaaggaaattaaaaataaagatgagattcttgcgttgttaaaagctttattcttaccaaaaatgctttcgatcattcattgcccggggcatcaaaagggtcactcagcggaggctcgtggaaaccgtatggcggaccaagctgcccgtaaggcggcgatcacagagaccccggatacatcaacgctgttgatcgaaaacagctctccctacactagcgagcatttttaa

SEQ ID NO: 212 - DNA, 2115 bp, synthetic construct
  source 1..2115: mol_type = other DNA
atgggcagcagccatcatcatcatcatcacagcagcggcctggtgccgcgcggcagccatatgactttaaatattgaggatgagcatgcgttacatgagacatcaaaagaacccgacgtgagcttagggtcaacgtggctttctgacttcccccaggcgtgggcggagactggcggaatggggttagctgtccgccaagcaccgttgatcatcccgttaaaggcaacgtctacacctgtctctatcaaacagtaccccatgagtcgtgaggcccgcctggggattaagccacatattcgtcgcttgtatgaccaggggatcttggtcccatgtcaatctccgtggaacaccccccttcgtcccgtgaaaaagccaggtacaaacgattatcgtccagttcaagatcttcgcgaggtcaacaaacgcgtagaagacatccatccgactgtacctaatccttataatctgttatcaggcctgcccccatcgcaccaatggtatacagtattagacttgaaagacgcgttcttttgcctgcgtctgcacccaacgtctcagccgctgtttgcgttcgaatggcgtgatcctgaaatgggaatttcgggtcagttaacctggactcgtctgccccagggctttaaaaacagccccacattgttcgatgaagcacttcaccgtgacttagcagacttccgtatccaacacccagacttaattctgttacagtatgttgacgaccttttgttggcggcaacgtctgaacttgactgtcagcaaggcacacgcgcgttattacaaacgttaggtaacttaggatatcgtgcgtccgcgaaaaaggcgcaaatttgtcaaaaacaggtaaagtaccttgggtatttgctgaaagaaggtcaacgttggattactgatgcgcgtaaggagaccgtaatggggcagcctacgcctaagacgccacgcgaattgcgtgaatttttgggcaaagcgggattctgtcgtttatggattcctgggttcgctgaaatggctgcacccctgtaccccttaacaaaaacagggacgcttttcaactgggggccagaccagcaaaaggcgtatcaggagatcaaacaagctttgttgaccgcacccgcgttgggtcttccggatttaaccaagccctttgagctgttcgttgatgaaaaacagggatatgcaaaaggagtattaacccaaaagttaggcccgtggcgtcgccctgttgcttacttgagtaaaaaattggatcctgtcgcagcaggatggccaccgtgcttgcgtatggtcgcggcaattgccgttttgacaaaggatgcaggtaagttgacgatgggtcaacccttaaacatcttggctccacatgctgtagaagcgttagtaaagcagcccccagaccgctggctttctaatgcgcgcatgacccactatcaggcgcttctgcttgatacggatcgtgtacaatttggaccagttgtagctttgaatccagctactttgcttccccttccagaagaaggacttcagcacaattgtttagatattctggccgaggcacatgggacgcgccctgatttgacggatcagccactgcctgatgccgaccatacatggtatactggcggcagtagtcttcttcaagaggggcaacgcaaggcgggagcagccgtcactacggagaccgaagttatctgggccaaagcgttacccgcgggaacatccgcgcaacgtgcacagttaatcgctctgacacaggccctgaagatggcagagggcaaaaagttgaatgtctacaccaactcacgttatgcttttgcaacagcgcattggcatggcgaaatttaccgccgccgtggtctgctgactagtgagggtaaggaaattaaaaataaagatgagattcttgcgttgttaaaagctttattcttaccaaaacgcctttcgatcattcattgcccggggcatcaaaagggtcactcagcggaggtacgtggaaaccgtatggcggaccaagctgcccgtaaggcggcgatcacagagaccccggatacatcaacgctgttgatcgaaaacagctctccctacactagcgagcatttttaa

SEQ ID NO: 213 - DNA, 2115 bp, synthetic construct
  source 1..2115: mol_type = other DNA
atgggcagcagccatcatcatcatcatcacagcagcggcctggtgccgcgcggcagccatatgactttaaatattgaggatgagcatcgtttacatgagacatcaaaagaacccgacgtgagcttagggtcaacgtggctttctgacttcccccaggcgtgggcggagactggcggaatggggttagctgtccgccaagcaccgttgatcatcccgttaaaggcaacgtctacacctgtctctatcaaacagtaccccatgagtcgtgaggcccgcctggggattaagccacatattcgtcgcttgtatgaccaggggatcttggtcccatgtcaatctccgtggaacaccccccttcgtcccgtgaaaaagccaggtacaaacgattatcgtccagttcaagatcttcgcgaggtcaacaaacgcgtagaagacatccatccgactgtacctaatccttataatctgttatcaggcctgcccccatcgcaccaatggtatacagtattagacttgaaagacgcgttcttttgcctgcccctgcacccaacgtctcagccgctgtttgcgttcgaatgggaggatcctgaaatgggaatttcgggtcagttaacctggactcgtctgccccagggctttaaaaacagccccacattgttcgatgaagcacttcaccgtgacttagcagacttccgtatccaacacccagacttaattctgttacagtatgttgacgaccttttgttggcggcaacgtctgaacttgactgtcagcaaggcacacgcgcgttattacaaacgttaggtaacttaggatatcgtgcgtccgcgaaaaaggcgcaaatttgtcaaaaacaggtaaagtaccttgggtatttgctgaaagaaggtcaacgttggattactgatgcgcgtaaggagaccgtaatggggcagcctacgcctaagacgccacgcgaattgcgtgaatttttgggcaaagcgggattctgtcgtttatggattcctgggttcgctgaaatggctgcacccctgtaccccttaacaaaaacagggacgcttttcaactgggggccagaccagcaaaaggcgtatcaggagatcaaacaagctttgttgaccgcacccgcgttgggtcttccggatttaaccaagccctttgagctgttcgttgatgaaaaacagggatatgcaaaaggagtattaacccaaaagttaggcccgtggcgtcgccctgttgcttacttgagtaaaaaattggatcctgtcgcagcaggatggccaccgtgcttgcgtatggtcgcggcaattgccgttttgacaaaggatgcaggtaagttgacgatgggtcaacccttaaacatcttggctccacatgctgtagaagcgttagtaaagcagcccccagaccgctggctttctaatgcgcgcatgacccactatcaggcgcttctgcttgatacggatcgtgtacaatttggaccagttgtagctttgaatccagctactttgcttccccttccagaagaaggacttcagcacaattgtttagatattctggccgaggcacatgggacgcgccctgatttgacggatcagccactgcctgatgccgaccatacatggtatactggcggcagtagtcttcttcaagaggggcaacgcaaggcgggagcagccgtcactacggagaccgaagttatctgggccaaagcgttacccgcgggaacatccgcgcaacgtgcacagttaatcgctctgacacaggccctgaagatggcagagggcaaaaagttgaatgtctacaccaactcacgttatgcttttgcaacagcgcattggcatggcgaaatttaccgccgccgtggtctgctgactagtgagggtaaggaaattaaaaataaagatgagattcttgcgttgttaaaagctttattcttaccaaaacgcctttcgatcattcattgcccggggcatcaaaagggtcactcagcggaggctcgtggaaaccgtatggcggaccaagctgcccgtaaggcggcgatcacagagaccccggatacatcaacgctgttgatcgaaaacagctctccctacactagcgagcatttttaa

SEQ ID NO: 214 - DNA, 2115 bp, synthetic construct
  source 1..2115: mol_type = other DNA
atgggcagcagccatcatcatcatcatcacagcagcggcctggtgccgcgcggcagccatatgactttaaatattgaggatgagcatcgtttacatgagacatcaaaagaacccgacgtgagcttagggtcaacgtggctttctgacttcccccaggcgtgggcggagactggcggaatggggttagctgtccgccaagcaccgttgatcatcccgttaaaggcaacgtctacacctgtctctatcaaacagtaccccatgagtcgtgaggcccgcctggggattaagccacatattcgtcgcttgtatgaccaggggatcttggtcccatgtcaatctccgtggaacaccccccttcgtcccgtgaaaaagccaggtacaaacgattatcgtccagttcaagatcttcgcgaggtcaacaaacgcgtagaagacatccatccgactgtacctaatccttataatctgttatcaggcctgcccccatcgcaccaatggtatacagtattagacttgaaagacgcgttcttttgcctgcccctgcacccaacgtctcagccgctgtttgcgttcgaatggcgtgatcctgaaatgggaatttcgggtcagttaacctggactcgtctgccccagggctttaaaaacagccccacattgttcgatgaagcacttcaccgtgacttagcagacttccgtatccaacacccagacttaattctgttacagtatgttgacgaccttttgttggcggcaacgtctgaacttgactgtcagcaaggcacacgcgcgttattacaaacgttaggtaacttaggatatcgtgcgtccgcgaaaaaggcgcaaatttgtcaaaaacaggtaaagtaccttgggtatttgctgaaagaaggtcaacgttggattactgatgcgcgtaaggagaccgtaatggggcagcctacgcctaagacgccacgcgaattgcgtgaatttttgggcaaagcgggattctgtcgtttatggattcctgggttcgctgaaatggctgcacccctgtaccccttaacaaaaacagggacgcttttcaactgggggccagaccagcaaaaggcgtatcaggagatcaaacaagctttgttgaccgcacccgcgttgggtcttccggatttaaccaagccctttgagctgttcgttgatgaaaaacagggatatgcaaaaggagtattaacccaaaagttaggcccgtggcgtcgccctgttgcttacttgagtaaaaaattggatcctgtcgcagcaggatggccaccgtgcttgcgtatggtcgcggcaattgccgttttgacaaaggatgcaggtaagttgacgatgggtcaacccttaacaatcttggctccacatgctgtagaagcgttagtaaagcagcccccagaccgctggctttctaatgcgcgcatgacccactatcaggcgcttctgcttgatacggatcgtgtacaatttggaccagttgtagctttgaatccagctactttgcttccccttccagaagaaggacttcagcacaattgtttagatattctggccgaggcacatgggacgcgccctgatttgacggatcagccactgcctgatgccgaccatacatggtatactggcggcagtagtcttcttcaagaggggcaacgcaaggcgggagcagccgtcactacggagaccgaagttatctgggccaaagcgttacccgcgggaacatccgcgcaacgtgcacagttaatcgctctgacacaggccctgaagatggcagagggcaaaaagttgaatgtctacaccaactcacgttatgcttttgcaacagcgcattggcatggcgaaatttaccgccgccgtggtctgctgactagtgagggtaaggaaattaaaaataaagatgagattcttgcgttgttaaaagctttattcttaccaaaacgcctttcgatcattcattgcccggggcatcaaaagggtcactcagcggaggctcgtggaaaccgtatggcggaccaagctgcccgtaaggcggcgatcacagagaccccggatacatcaacgctgttgatcgaaaacagctctccctacactagcgagcatttttaa

SEQ ID NO: 215 - DNA, 2115 bp, synthetic construct
  source 1..2115: mol_type = other DNA
atgggcagcagccatcatcatcatcatcacagcagcggcctggtgccgcgcggcagccatatgactttaaatattgaggatgagcatcgtttacatgagacatcaaaagaacccgacgtgagcttagggtcaacgtggctttctgacttcccccaggcgtgggcggagactggcggaatggggttagctgtccgccaagcaccgttgatcatcccgttaaaggcaacgtctacacctgtctctatcaaacagtaccccatgagtcgtgaggcccgcctggggattaagccacatattcgtcgcttgtatgaccaggggatcttggtcccatgtcaatctccgtggaacaccccccttcgtcccgtgaaaaagccaggtacaaacgattatcgtccagttcaagatcttcgcgaggtcaacaaacgcgtagaagacatccatccgactgtacctaatccttataatctgttatcaggcctgcccccatcgcaccaatggtatacagtattagacttgaaagacgcgttcttttgcctgcccctgcacccaacgtctcagccgctgtttgcgttcgaatggcgtgatcctgaaatgggaatttcgggtcagttaacctggactcgtctgccccagggctttaaaaacagccccacattgttcgatgaagcacttcaccgtgacttagcagacttccgtatccaacacccagacttaattctgttacagtatgttgacgaccttttgttggcggcaacgtctgaacttgactgtcagcaaggcacacgcgcgttattacaaacgttaggtaacttaggatatcgtgcgtccgcgaaaaaggcgcaaatttgtcaaaaacaggtaaagtaccttgggtatttgctgaaagaaggtcaacgttggattactgatgcgcgtaaggagaccgtaatggggcagcctacgcctaagacgccacgcgaattgcgtgaatttttgggcaaagcgggattctgtcgtttatggattcctgggttcgctgaaatggctgcacccctgtaccccttaacaaaaacagggacgcttttcaactgggggccagaccagcaaaaggcgtatcaggagatcaaacaagctttgttgaccgcacccgcgttgggtcttccggatttaaccaagccctttgagctgttcgttgatgaaaaacagggatatgcaaaaggagtattaacccaaaagttaggcccgtggcgtcgccctgttgcttacttgagtaaaaaattggatcctgtcgcagcaggatggccaccgtgcttgcgtatggtcgcggcaattgccgttttgacaaaggatgcaggtaagttgacgatgggtcaacccttaaacatcttggctccacatgctgtagaagcgttagtaaagcagcccccagaccgctggctttctaatgcgcgcatgacccactatcaggcgcttctgcttgataacgatcgtgtacaatttggaccagttgtagctttgaatccagctactttgcttccccttccagaagaaggacttcagcacaattgtttagatattctggccgaggcacatgggacgcgccctgatttgacggatcagccactgcctgatgccgaccatacatggtatactggcggcagtagtcttcttcaagaggggcaacgcaaggcgggagcagccgtcactacggagaccgaagttatctgggccaaagcgttacccgcgggaacatccgcgcaacgtgcacagttaatcgctctgacacaggccctgaagatggcagagggcaaaaagttgaatgtctacaccaactcacgttatgcttttgcaacagcgcattggcatggcgaaatttaccgccgccgtggtctgctgactagtgagggtaaggaaattaaaaataaagatgagattcttgcgttgttaaaagctttattcttaccaaaacgcctttcgatcattcattgcccggggcatcaaaagggtcactcagcggaggctcgtggaaaccgtatggcggaccaagctgcccgtaaggcggcgatcacagagaccccggatacatcaacgctgttgatcgaaaacagctctccctacactagcgagcatttttaa

SEQ ID NO: 216 - DNA, 1569 bp, synthetic construct
  source 1..1569: mol_type = other DNA
atgggcagcagccatcatcatcatcatcacagcagcggcctggtgccgcgcggcagccatatgactttaaatattgaggatgagcatcgtttacatgagacatcaaaagaacccgacgtgagcttagggtcaacgtggctttctgacttcccccaggcgtgggcggagactggcggaatggggttagctgtccgccaagcaccgttgatcatcccgttaaaggcaacgtctacacctgtctctatcaaacagtaccccatgagtcgtgaggcccgcctggggattaagccacatattcgtcgcttgtatgaccaggggatcttggtcccatgtcaatctccgtggaacaccccccttcgtcccgtgaaaaagccaggtacaaacgattatcgtccagttcaagatcttcgcgaggtcaacaaacgcgtagaagacatccatccgactgtacctaatccttataatctgttatcaggcctgcccccatcgcaccaatggtatacagtattagacttgaaagacgcgttcttttgcctgcccctgcacccaacgtctcagccgctgtttgcgttcgaatggcgtgatcctgaaatgggaatttcgggtcagttaacctggactcgtctgccccagggctttaaaaacagccccacattgttcgatgaagcacttcaccgtgacttagcagacttccgtatccaacacccagacttaattctgttacagtatgttgacgaccttttgttggcggcaacgtctgaacttgactgtcagcaaggcacacgcgcgttattacaaacgttaggtaacttaggatatcgtgcgtccgcgaaaaaggcgcaaatttgtcaaaaacaggtaaagtaccttgggtatttgctgaaagaaggtcaacgttggattactgatgcgcgtaaggagaccgtaatggggcagcctacgcctaagacgccacgcgaattgcgtgaatttttgggcaaagcgggattctgtcgtttatggattcctgggttcgctgaaatggctgcacccctgtaccccttaacaaaaacagggacgcttttcaactgggggccagaccagcaaaaggcgtatcaggagatcaaacaagctttgttgaccgcacccgcgttgggtcttccggatttaaccaagccctttgagctgttcgttgatgaaaaacagggatatgcaaaaggagtattaacccaaaagttaggcccgtggcgtcgccctgttgcttacttgagtaaaaaattggatcctgtcgcagcaggatggccaccgtgcttgcgtatggtcgcggcaattgccgttttgacaaaggatgcaggtaagttgacgatgggtcaacccttaaacatcttggctccacatgctgtagaagcgttagtaaagcagcccccagaccgctggctttctaatgcgcgcatgacccactatcaggcgcttctgcttgatacggatcgtgtacaatttggaccagttgtagctttgaatccagctactttgcttccccttccagaagaaggacttcagcacaattgtttagatattctggccgagtaa

SEQ ID NO: 217 - DNA, 2115 bp, synthetic construct
  source 1..2115: mol_type = other DNA
atgggcagcagccatcatcatcatcatcacagcagcggcctggtgccgcgcggcagccatatgactttaaatattgaggatgagcatcgtttacatgagacatcaaaagaacccgacgtgagcttagggtcaacgtggctttctgacttcccccaggcgtgggcggagactggcggaatggggttagctgtccgccaagcaccgttgatcatcccgttaaaggcaacgtctacacctgtctctatcaaacagtaccccatgagtcgtgaggcccgcctggggattaagccacatattcgtcgcttgtatgaccaggggatcttggtcccatgtcaatctccgtggaacaccccccttcgtcccgtgaaaaagccaggtacaaacgattatcgtccagttcaagatcttcgcgaggtcaacaaacgcgtagaagacatccatccgactgtacctaatccttataatctgttatcaggcctgcccccatcgcaccaatggtatacagtattagacttgaaagacgcgttcttttgcctgcccctgcacccaacgtctcagccgctgtttgcgttcgaatggcgtgatcctgaaatgggaatttcgggtcagttaacctggactcgtctgccccagggctttaaaaacagccccacattgttcgatgaagcacttcaccgtgacttagcagacttccgtatccaacacccagacttaattctgttacagtatgttgacgaccttttgttggcggcaacgtctgaacttgactgtcagcaaggcacacgcgcgttattacaaacgttaggtaacttaggatatcgtgcgtccgcgaaaaaggcgcaaatttgtcaaaaacaggtaaagtaccttgggtatttgctgaaagaaggtcaacgttggattactgatgcgcgtaaggagaccgtaatggggcagcctacgcctaagacgccacgcgaattgcgtgaatttttgggcaaagcgggattctgtcgtttatggattcctgggttcgctgaaatggctgcacccctgtaccccttaacaaaaacagggacgcttttcaactgggggccagaccagcaaaaggcgtatcaggagatcaaacaagctttgttgaccgcacccgcgttgggtcttccggatttaaccaagccctttgagctgttcgttgatgaaaaacagggatatgcaaaaggagtattaacccaaaagttaggcccgtggcgtcgccctgttgcttacttgagtaaaaaattggatcctgtcgcagcaggatggccaccgtgcttgcgtatggtcgcggcaattgccgttttgacaaaggatgcaggtaagttgacgatgggtcaacccttaaacatcttggctccacatgctgtagaagcgttagtaaagcagcccccagaccgctggctttctaatgcgcgcatgacccactatcaggcgcttctgcttgatacggatcgtgtacaatttggaccagttgtagctttgaatccagctactttgcttccccttccagaagaaggacttcagcacaattgtttagatattctggccgaggcacatgggacgcgccctgatttgacggatcagccactgcctgatgccgaccatacatggtatactggcggcagtagttatcttcaagaggggcaacgcaaggcgggagcagccgtcactacggagaccgaagttatctgggccaaagcgttacccgcgggaacatccgcgcaacgtgcacagttaatcgctctgacacaggccctgaagatggcagagggcaaaaagttgaatgtctacaccaactcacgttatgcttttgcaacagcgcattggcatggcgaaatttaccgccgccgtggtctgctgactagtgagggtaaggaaattaaaaataaagatgagattcttgcgttgttaaaagctttattcttaccaaaacgcctttcgatcattcattgcccggggcatcaaaagggtcactcagcggaggctcgtggaaaccgtatggcggaccaagctgcccgtaaggcggcgatcacagagaccccggatacatcaacgctgttgatcgaaaacagctctccctacactagcgagcatttttaa

SEQ ID NO: 218 - DNA, 2115 bp, synthetic construct
  source 1..2115: mol_type = other DNA
atgggcagcagccatcatcatcatcatcacagcagcggcctggtgccgcgcggcagccatatgactttaaatattgaggatgagcatcgtttacatgagacatcaaaagaacccgacgtgagcttagggtcaacgtggctttctgacttcccccaggcgtgggcggagactggcggaatggggttagctgtccgccaagcaccgttgatcatcccgttaaaggcaacgtctacacctgtctctatcaaacagtaccccatgagtcgtgaggcccgcctggggattaagccacatattcgtcgcttgtatgaccaggggatcttggtcccatgtcaatctccgtggaacaccccccttcgtcccgtgaaaaagccaggtacaaacgattatcgtccagttcaagatcttcgcgaggtcaacaaacgcgtagaagacatccatccgactgtacctaatccttataatctgttatcaggcctgcccccatcgcaccaatggtatacagtattagacttgaaagacgcgttcttttgcctgtctctgcacccaacgtctcagccgctgtttgcgttcgaatgggaggatcctgaaatgggaatttcgggtcagttaacctggactcgtctgccccagggctttaaaaacagccccacattgttcgatgaagcacttcaccgtgacttagcagacttccgtatccaacacccagacttaattctgttacagtatgttgacgaccttttgttggcggcaacgtctgaacttgactgtcagcaaggcacacgcgcgttattacaaacgttaggtaacttaggatatcgtgcgtccgcgaaaaaggcgcaaatttgtcaaaaacaggtaaagtaccttgggtatttgctgaaagaaggtcaacgttggattactgatgcgcgtaaggagaccgtaatggggcagcctacgcctaagacgccacgcgaattgcgtgaatttttgggcaaagcgggattctgtcgtttatggattcctgggttcgctgaaatggctgcacccctgtaccccttaacaaaaacagggacgcttttcaactgggggccagaccagcaaaaggcgtatcaggagatcaaacaagctttgttgaccgcacccgcgttgggtcttccggatttaaccaagccctttgagctgttcgttgatgaaaaacagggatatgcaaaaggagtattaacccaaaagttaggcccgtggcgtcgccctgttgcttacttgagtaaaaaattggatcctgtcgcagcaggatggccaccgtgcttgcgtatggtcgcggcaattgccgttttgacaaaggatgcaggtaagttgacgatgggtcaacccttaaacatcttggctccacatgctgtagaagcgttagtaaagcagcccccagaccgctggctttctaatgcgcgcatgacccactatcaggcgcttctgcttgatacggatcgtgtacaatttggaccagttgtagctttgaatccagctactttgcttccccttccagaagaaggacttcagcacaattgtttagatattctggccgaggcacatgggacgcgccctgatttgacggatcagccactgcctgatgccgaccatacatggtatactggcggcagtagtcttcttcaagaggggcaacgcaaggcgggagcagccgtcactacggagaccgaagttatctgggccaaagcgttacccgcgggaacatccgcgcaacgtgcacagttaatcgctctgacacaggccctgaagatggcagagggcaaaaagttgaatgtctacaccaactcacgttatgcttttgcaacagcgcattggcatggcgaaatttaccgccgccgtggtctgctgactagtgagggtaaggaaattaaaaataaagatgagattcttgcgttgttaaaagctttattcttaccaaaacgcctttcgatcattcattgcccggggcatcaaaagggtcactcagcggaggctcgtggaaaccgtatggcggaccaagctgcccgtaaggcggcgatcacagagaccccggatacatcaacgctgttgatcgaaaacagctctccctacactagcgagcatttttaa

SEQ ID NO: 219 - DNA, 2115 bp, synthetic construct
  source 1..2115: mol_type = other DNA
atgggcagcagccatcatcatcatcatcacagcagcggcctggtgccgcgcggcagccatatgactttaaatattgaggatgagcatcgtttacatgagacatcaaaagaacccgacgtgagcttagggtcaacgtggctttctgacttcccccaggcgtgggcggagactggcggaatggggttagctgtccgccaagcaccgttgatcatcccgttaaaggcaacgtctacacctgtctctatcaaacagtaccccatgagtcgtgaggcccgcctggggattaagccacatattcgtcgcttgtatgaccaggggatcttggtcccatgtcaatctccgtggaacaccccccttcgtcccgtgaaaaagccaggtacaaacgattatcgtccagttcaagatcttcgcgaggtcaacaaacgcgtagaagacatccatccgactgtacctaatccttataatctgttatcaggcctgcccccatcgcaccaatggtatacagtattagacttgaaagacgcgttcttttgcctgtctctgcacccaacgtctcagccgctgtttgcgttcgaatggcgtgatcctgaaatgggaatttcgggtcagttaacctggactcgtctgccccagggctttaaaaacagccccacattgttcgatgaagcacttcaccgtgacttagcagacttccgtatccaacacccagacttaattctgttacagtatgttgacgaccttttgttggcggcaacgtctgaacttgactgtcagcaaggcacacgcgcgttattacaaacgttaggtaacttaggatatcgtgcgtccgcgaaaaaggcgcaaatttgtcaaaaacaggtaaagtaccttgggtatttgctgaaagaaggtcaacgttggattactgatgcgcgtaaggagaccgtaatggggcagcctacgcctaagacgccacgcgaattgcgtgaatttttgggcaaagcgggattctgtcgtttatggattcctgggttcgctgaaatggctgcacccctgtaccccttaacaaaaacagggacgcttttcaactgggggccagaccagcaaaaggcgtatcaggagatcaaacaagctttgttgaccgcacccgcgttgggtcttccggatttaaccaagccctttgagctgttcgttgatgaaaaacagggatatgcaaaaggagtattaacccaaaagttaggcccgtggcgtcgccctgttgcttacttgagtaaaaaattggatcctgtcgcagcaggatggccaccgtgcttgcgtatggtcgcggcaattgccgttttgacaaaggatgcaggtaagttgacgatgggtcaacccttaacaatcttggctccacatgctgtagaagcgttagtaaagcagcccccagaccgctggctttctaatgcgcgcatgacccactatcaggcgcttctgcttgatacggatcgtgtacaatttggaccagttgtagctttgaatccagctactttgcttccccttccagaagaaggacttcagcacaattgtttagatattctggccgaggcacatgggacgcgccctgatttgacggatcagccactgcctgatgccgaccatacatggtatactggcggcagtagtcttcttcaagaggggcaacgcaaggcgggagcagccgtcactacggagaccgaagttatctgggccaaagcgttacccgcgggaacatccgcgcaacgtgcacagttaatcgctctgacacaggccctgaagatggcagagggcaaaaagttgaatgtctacaccaactcacgttatgcttttgcaacagcgcattggcatggcgaaatttaccgccgccgtggtctgctgactagtgagggtaaggaaattaaaaataaagatgagattcttgcgttgttaaaagctttattcttaccaaaacgcctttcgatcattcattgcccggggcatcaaaagggtcactcagcggaggctcgtggaaaccgtatggcggaccaagctgcccgtaaggcggcgatcacagagaccccggatacatcaacgctgttgatcgaaaacagctctccctacactagcgagcatttttaa

SEQ ID NO: 220 - DNA, 2115 bp, synthetic construct
  source 1..2115: mol_type = other DNA
atgggcagcagccatcatcatcatcatcacagcagcggcctggtgccgcgcggcagccatatgactttaaatattgaggatgagcatcgtttacatgagacatcaaaagaacccgacgtgagcttagggtcaacgtggctttctgacttcccccaggcgtgggcggagactggcggaatggggttagctgtccgccaagcaccgttgatcatcccgttaaaggcaacgtctacacctgtctctatcaaacagtaccccatgagtcgtgaggcccgcctggggattaagccacatattcgtcgcttgtatgaccaggggatcttggtcccatgtcaatctccgtggaacaccccccttcgtcccgtgaaaaagccaggtacaaacgattatcgtccagttcaagatcttcgcgaggtcaacaaacgcgtagaagacatccatccgactgtacctaatccttataatctgttatcaggcctgcccccatcgcaccaatggtatacagtattagacttgaaagacgcgttcttttgcctgtctctgcacccaacgtctcagccgctgtttgcgttcgaatggcgtgatcctgaaatgggaatttcgggtcagttaacctggactcgtctgccccagggctttaaaaacagccccacattgttcgatgaagcacttcaccgtgacttagcagacttccgtatccaacacccagacttaattctgttacagtatgttgacgaccttttgttggcggcaacgtctgaacttgactgtcagcaaggcacacgcgcgttattacaaacgttaggtaacttaggatatcgtgcgtccgcgaaaaaggcgcaaatttgtcaaaaacaggtaaagtaccttgggtatttgctgaaagaaggtcaacgttggattactgatgcgcgtaaggagaccgtaatggggcagcctacgcctaagacgccacgcgaattgcgtgaatttttgggcaaagcgggattctgtcgtttatggattcctgggttcgctgaaatggctgcacccctgtaccccttaacaaaaacagggacgcttttcaactgggggccagaccagcaaaaggcgtatcaggagatcaaacaagctttgttgaccgcacccgcgttgggtcttccggatttaaccaagccctttgagctgttcgttgatgaaaaacagggatatgcaaaaggagtattaacccaaaagttaggcccgtggcgtcgccctgttgcttacttgagtaaaaaattggatcctgtcgcagcaggatggccaccgtgcttgcgtatggtcgcggcaattgccgttttgacaaaggatgcaggtaagttgacgatgggtcaacccttaaacatcttggctccacatgctgtagaagcgttagtaaagcagcccccagaccgctggctttctaatgcgcgcatgacccactatcaggcgcttctgcttgataacgatcgtgtacaatttggaccagttgtagctttgaatccagctactttgcttccccttccagaagaaggacttcagcacaattgtttagatattctggccgaggcacatgggacgcgccctgatttgacggatcagccactgcctgatgccgaccatacatggtatactggcggcagtagtcttcttcaagaggggcaacgcaaggcgggagcagccgtcactacggagaccgaagttatctgggccaaagcgttacccgcgggaacatccgcgcaacgtgcacagttaatcgctctgacacaggccctgaagatggcagagggcaaaaagttgaatgtctacaccaactcacgttatgcttttgcaacagcgcattggcatggcgaaatttaccgccgccgtggtctgctgactagtgagggtaaggaaattaaaaataaagatgagattcttgcgttgttaaaagctttattcttaccaaaacgcctttcgatcattcattgcccggggcatcaaaagggtcactcagcggaggctcgtggaaaccgtatggcggaccaagctgcccgtaaggcggcgatcacagagaccccggatacatcaacgctgttgatcgaaaacagctctccctacactagcgagcatttttaa

SEQ ID NO: 221 - DNA, 1569 bp, synthetic construct
  source 1..1569: mol_type = other DNA
atgggcagcagccatcatcatcatcatcacagcagcggcctggtgccgcgcggcagccatatgactttaaatattgaggatgagcatcgtttacatgagacatcaaaagaacccgacgtgagcttagggtcaacgtggctttctgacttcccccaggcgtgggcggagactggcggaatggggttagctgtccgccaagcaccgttgatcatcccgttaaaggcaacgtctacacctgtctctatcaaacagtaccccatgagtcgtgaggcccgcctggggattaagccacatattcgtcgcttgtatgaccaggggatcttggtcccatgtcaatctccgtggaacaccccccttcgtcccgtgaaaaagccaggtacaaacgattatcgtccagttcaagatcttcgcgaggtcaacaaacgcgtagaagacatccatccgactgtacctaatccttataatctgttatcaggcctgcccccatcgcaccaatggtatacagtattagacttgaaagacgcgttcttttgcctgtctctgcacccaacgtctcagccgctgtttgcgttcgaatggcgtgatcctgaaatgggaatttcgggtcagttaacctggactcgtctgccccagggctttaaaaacagccccacattgttcgatgaagcacttcaccgtgacttagcagacttccgtatccaacacccagacttaattctgttacagtatgttgacgaccttttgttggcggcaacgtctgaacttgactgtcagcaaggcacacgcgcgttattacaaacgttaggtaacttaggatatcgtgcgtccgcgaaaaaggcgcaaatttgtcaaaaacaggtaaagtaccttgggtatttgctgaaagaaggtcaacgttggattactgatgcgcgtaaggagaccgtaatggggcagcctacgcctaagacgccacgcgaattgcgtgaatttttgggcaaagcgggattctgtcgtttatggattcctgggttcgctgaaatggctgcacccctgtaccccttaacaaaaacagggacgcttttcaactgggggccagaccagcaaaaggcgtatcaggagatcaaacaagctttgttgaccgcacccgcgttgggtcttccggatttaaccaagccctttgagctgttcgttgatgaaaaacagggatatgcaaaaggagtattaacccaaaagttaggcccgtggcgtcgccctgttgcttacttgagtaaaaaattggatcctgtcgcagcaggatggccaccgtgcttgcgtatggtcgcggcaattgccgttttgacaaaggatgcaggtaagttgacgatgggtcaacccttaaacatcttggctccacatgctgtagaagcgttagtaaagcagcccccagaccgctggctttctaatgcgcgcatgacccactatcaggcgcttctgcttgatacggatcgtgtacaatttggaccagttgtagctttgaatccagctactttgcttccccttccagaagaaggacttcagcacaattgtttagatattctggccgagtaa

SEQ ID NO: 222 - DNA, 2115 bp, synthetic construct
  source 1..2115: mol_type = other DNA
atgggcagcagccatcatcatcatcatcacagcagcggcctggtgccgcgcggcagccatatgactttaaatattgaggatgagcatcgtttacatgagacatcaaaagaacccgacgtgagcttagggtcaacgtggctttctgacttcccccaggcgtgggcggagactggcggaatggggttagctgtccgccaagcaccgttgatcatcccgttaaaggcaacgtctacacctgtctctatcaaacagtaccccatgagtcgtgaggcccgcctggggattaagccacatattcgtcgcttgtatgaccaggggatcttggtcccatgtcaatctccgtggaacaccccccttcgtcccgtgaaaaagccaggtacaaacgattatcgtccagttcaagatcttcgcgaggtcaacaaacgcgtagaagacatccatccgactgtacctaatccttataatctgttatcaggcctgcccccatcgcaccaatggtatacagtattagacttgaaagacgcgttcttttgcctgtctctgcacccaacgtctcagccgctgtttgcgttcgaatggcgtgatcctgaaatgggaatttcgggtcagttaacctggactcgtctgccccagggctttaaaaacagccccacattgttcgatgaagcacttcaccgtgacttagcagacttccgtatccaacacccagacttaattctgttacagtatgttgacgaccttttgttggcggcaacgtctgaacttgactgtcagcaaggcacacgcgcgttattacaaacgttaggtaacttaggatatcgtgcgtccgcgaaaaaggcgcaaatttgtcaaaaacaggtaaagtaccttgggtatttgctgaaagaaggtcaacgttggattactgatgcgcgtaaggagaccgtaatggggcagcctacgcctaagacgccacgcgaattgcgtgaatttttgggcaaagcgggattctgtcgtttatggattcctgggttcgctgaaatggctgcacccctgtaccccttaacaaaaacagggacgcttttcaactgggggccagaccagcaaaaggcgtatcaggagatcaaacaagctttgttgaccgcacccgcgttgggtcttccggatttaaccaagccctttgagctgttcgttgatgaaaaacagggatatgcaaaaggagtattaacccaaaagttaggcccgtggcgtcgccctgttgcttacttgagtaaaaaattggatcctgtcgcagcaggatggccaccgtgcttgcgtatggtcgcggcaattgccgttttgacaaaggatgcaggtaagttgacgatgggtcaacccttaaacatcttggctccacatgctgtagaagcgttagtaaagcagcccccagaccgctggctttctaatgcgcgcatgacccactatcaggcgcttctgcttgatacggatcgtgtacaatttggaccagttgtagctttgaatccagctactttgcttccccttccagaagaaggacttcagcacaattgtttagatattctggccgaggcacatgggacgcgccctgatttgacggatcagccactgcctgatgccgaccatacatggtatactggcggcagtagttatcttcaagaggggcaacgcaaggcgggagcagccgtcactacggagaccgaagttatctgggccaaagcgttacccgcgggaacatccgcgcaacgtgcacagttaatcgctctgacacaggccctgaagatggcagagggcaaaaagttgaatgtctacaccaactcacgttatgcttttgcaacagcgcattggcatggcgaaatttaccgccgccgtggtctgctgactagtgagggtaaggaaattaaaaataaagatgagattcttgcgttgttaaaagctttattcttaccaaaacgcctttcgatcattcattgcccggggcatcaaaagggtcactcagcggaggctcgtggaaaccgtatggcggaccaagctgcccgtaaggcggcgatcacagagaccccggatacatcaacgctgttgatcgaaaacagctctccctacactagcgagcatttttaa

SEQ ID NO: 223 - DNA, 2115 bp, synthetic construct
  source 1..2115: mol_type = other DNA
atgggcagcagccatcatcatcatcatcacagcagcggcctggtgccgcgcggcagccatatgactttaaatattgaggatgagcatcgtttacatgagacatcaaaagaacccgacgtgagcttagggtcaacgtggctttctgacttcccccaggcgtgggcggagactggcggaatggggttagctgtccgccaagcaccgttgatcatcccgttaaaggcaacgtctacacctgtctctatcaaacagtaccccatgagtcgtgaggcccgcctggggattaagccacatattcgtcgcttgtatgaccaggggatcttggtcccatgtcaatctccgtggaacaccccccttcgtcccgtgaaaaagccaggtacaaacgattatcgtccagttcaagatcttcgcgaggtcaacaaacgcgtagaagacatccatccgactgtacctaatccttataatctgttatcaggcctgcccccatcgcaccaatggtatacagtattagacttgaaagacgcgttcttttgcctgcgtctgcacccaacgtctcagccgctgtttgcgttcgaatgggaggatcctgaaatgggaatttcgggtcagttaacctggactcgtctgccccagggctttaaaaacagccccacattgttcgatgaagcacttcaccgtgacttagcagacttccgtatccaacacccagacttaattctgttacagtatgttgacgaccttttgttggcggcaacgtctgaacttgactgtcagcaaggcacacgcgcgttattacaaacgttaggtaacttaggatatcgtgcgtccgcgaaaaaggcgcaaatttgtcaaaaacaggtaaagtaccttgggtatttgctgaaagaaggtcaacgttggattactgatgcgcgtaaggaggatgtaatggggcagcctacgcctaagacgccacgcgaattgcgtgaatttttgggcaaagcgggattctgtcgtttatggattcctgggttcgctgaaatggctgcacccctgtaccccttaacaaaaacagggacgcttttcaactgggggccagaccagcaaaaggcgtatcaggagatcaaacaagctttgttgaccgcacccgcgttgggtcttccggatttaaccaagccctttgagctgttcgttgatgaaaaacagggatatgcaaaaggagtattaacccaaaagttaggcccgtggcgtcgccctgttgcttacttgagtaaaaaattggatcctgtcgcagcaggatggccaccgtgcttgcgtatggtcgcggcaattgccgttttgacaaaggatgcaggtaagttgacgatgggtcaacccttaaacatcttggctccacatgctgtagaagcgttagtaaagcagcccccagaccgctggctttctaatgcgcgcatgacccactatcaggcgcttctgcttgatacggatcgtgtacaatttggaccagttgtagctttgaatccagctactttgcttccccttccagaagaaggacttcagcacaattgtttagatattctggccgaggcacatgggacgcgccctgatttgacggatcagccactgcctgatgccgaccatacatggtatactggcggcagtagtcttcttcaagaggggcaacgcaaggcgggagcagccgtcactacggagaccgaagttatctgggccaaagcgttacccgcgggaacatccgcgcaacgtgcacagttaatcgctctgacacaggccctgaagatggcagagggcaaaaagttgaatgtctacaccaactcacgttatgcttttgcaacagcgcattggcatggcgaaatttaccgccgccgtggtctgctgactagtgagggtaaggaaattaaaaataaagatgagattcttgcgttgttaaaagctttattcttaccaaaacgcctttcgatcattcattgcccggggcatcaaaagggtcactcagcggaggctcgtggaaaccgtatggcggaccaagctgcccgtaaggcggcgatcacagagaccccggatacatcaacgctgttgatcgaaaacagctctccctacactagcgagcatttttaa

SEQ ID NO: 224 - DNA, 2115 bp, synthetic construct
  source 1..2115: mol_type = other DNA
atgggcagcagccatcatcatcatcatcacagcagcggcctggtgccgcgcggcagccatatgactttaaatattgaggatgagcatcgtttacatgagacatcaaaagaacccgacgtgagcttagggtcaacgtggctttctgacttcccccaggcgtgggcggagactggcggaatggggttagctgtccgccaagcaccgttgatcatcccgttaaaggcaacgtctacacctgtctctatcaaacagtaccccatgagtcgtgaggcccgcctggggattaagccacatattcgtcgcttgtatgaccaggggatcttggtcccatgtcaatctccgtggaacaccccccttcgtcccgtgaaaaagccaggtacaaacgattatcgtccagttcaagatcttcgcgaggtcaacaaacgcgtagaagacatccatccgactgtacctaatccttataatctgttatcaggcctgcccccatcgcaccaatggtatacagtattagacttgaaagacgcgttcttttgcctgcgtctgcacccaacgtctcagccgctgtttgcgttcgaatgggaggatcctgaaatgggaatttcgggtcagttaacctggactcgtctgccccagggctttaaaaacagccccacattgttcgatgaagcacttcaccgtgacttagcagacttccgtatccaacacccagacttaattctgttacagtatgttgacgaccttttgttggcggcaacgtctgaacttgactgtcagcaaggcacacgcgcgttattacaaacgttaggtaacttaggatatcgtgcgtccgcgaaaaaggcgcaaatttgtcaaaaacaggtaaagtaccttgggtatttgctgaaagaaggtcaacgttggattactgatgcgcgtaaggagaccgtaatggggcagcctacgcctaagacgccacgcgaattgcgtgaatttttgggcaaagcgggattctgtcgtttatggattcctgggttcgctgaaatggctgcacccctgtaccccttaacaaaaacagggacggagttcaactgggggccagaccagcaaaaggcgtatcaggagatcaaacaagctttgttgaccgcacccgcgttgggtcttccggatttaaccaagccctttgagctgttcgttgatgaaaaacagggatatgcaaaaggagtattaacccaaaagttaggcccgtggcgtcgccctgttgcttacttgagtaaaaaattggatcctgtcgcagcaggatggccaccgtgcttgcgtatggtcgcggcaattgccgttttgacaaaggatgcaggtaagttgacgatgggtcaacccttaaacatcttggctccacatgctgtagaagcgttagtaaagcagcccccagaccgctggctttctaatgcgcgcatgacccactatcaggcgcttctgcttgatacggatcgtgtacaatttggaccagttgtagctttgaatccagctactttgcttccccttccagaagaaggacttcagcacaattgtttagatattctggccgaggcacatgggacgcgccctgatttgacggatcagccactgcctgatgccgaccatacatggtatactggcggcagtagtcttcttcaagaggggcaacgcaaggcgggagcagccgtcactacggagaccgaagttatctgggccaaagcgttacccgcgggaacatccgcgcaacgtgcacagttaatcgctctgacacaggccctgaagatggcagagggcaaaaagttgaatgtctacaccaactcacgttatgcttttgcaacagcgcattggcatggcgaaatttaccgccgccgtggtctgctgactagtgagggtaaggaaattaaaaataaagatgagattcttgcgttgttaaaagctttattcttaccaaaacgcctttcgatcattcattgcccggggcatcaaaagggtcactcagcggaggctcgtggaaaccgtatggcggaccaagctgcccgtaaggcggcgatcacagagaccccggatacatcaacgctgttgatcgaaaacagctctccctacactagcgagcatttttaa

SEQ ID NO: 225 - DNA, 2115 bp, synthetic construct
  source 1..2115: mol_type = other DNA
atgggcagcagccatcatcatcatcatcacagcagcggcctggtgccgcgcggcagccatatgactttaaatattgaggatgagcatcgtttacatgagacatcaaaagaacccgacgtgagcttagggtcaacgtggctttctgacttcccccaggcgtgggcggagactggcggaatggggttagctgtccgccaagcaccgttgatcatcccgttaaaggcaacgtctacacctgtctctatcaaacagtaccccatgagtcgtgaggcccgcctggggattaagccacatattcgtcgcttgtatgaccaggggatcttggtcccatgtcaatctccgtggaacaccccccttcgtcccgtgaaaaagccaggtacaaacgattatcgtccagttcaagatcttcgcgaggtcaacaaacgcgtagaagacatccatccgactgtacctaatccttataatctgttatcaggcctgcccccatcgcaccaatggtatacagtattagacttgaaagacgcgttcttttgcctgcgtctgcacccaacgtctcagccgctgtttgcgttcgaatgggaggatcctgaaatgggaatttcgggtcagttaacctggactcgtctgccccagggctttaaaaacagccccacattgttcgatgaagcacttcaccgtgacttagcagacttccgtatccaacacccagacttaattctgttacagtatgttgacgaccttttgttggcggcaacgtctgaacttgactgtcagcaaggcacacgcgcgttattacaaacgttaggtaacttaggatatcgtgcgtccgcgaaaaaggcgcaaatttgtcaaaaacaggtaaagtaccttgggtatttgctgaaagaaggtcaacgttggattactgatgcgcgtaaggagaccgtaatggggcagcctacgcctaagacgccacgcgaattgcgtgaatttttgggcaaagcgggattctgtcgtttatggattcctgggttcgctgaaatggctgcacccctgtaccccttaacaaaaacagggacgcttttcaactgggggccagaccagcaaaaggcgtatcaggagatcaaacaagctttgttgaccgcacccgcgttgggtcttccggatttaaccaagccctttgagctgttcgttgatgaaaaacagggatatgcaaaaggagtattaacccaaaagttaggcccgtggcgtcgccctgttgcttacttgagtaaaaaattggatcctgtcgcagcaggatggccaccgtgcttgcgtatggtcgcggcaattgccgttttgacaaaggatgcaggtaagttgacgatgggtcaacccttaacaatcttggctccacatgctgtagaagcgttagtaaagcagcccccagaccgctggctttctaatgcgcgcatgacccactatcaggcgcttctgcttgatacggatcgtgtacaatttggaccagttgtagctttgaatccagctactttgcttccccttccagaagaaggacttcagcacaattgtttagatattctggccgaggcacatgggacgcgccctgatttgacggatcagccactgcctgatgccgaccatacatggtatactggcggcagtagtcttcttcaagaggggcaacgcaaggcgggagcagccgtcactacggagaccgaagttatctgggccaaagcgttacccgcgggaacatccgcgcaacgtgcacagttaatcgctctgacacaggccctgaagatggcagagggcaaaaagttgaatgtctacaccaactcacgttatgcttttgcaacagcgcattggcatggcgaaatttaccgccgccgtggtctgctgactagtgagggtaaggaaattaaaaataaagatgagattcttgcgttgttaaaagctttattcttaccaaaacgcctttcgatcattcattgcccggggcatcaaaagggtcactcagcggaggctcgtggaaaccgtatggcggaccaagctgcccgtaaggcggcgatcacagagaccccggatacatcaacgctgttgatcgaaaacagctctccctacactagcgagcatttttaa

SEQ ID NO: 226 - DNA, 2115 bp, synthetic construct
  source 1..2115: mol_type = other DNA
atgggcagcagccatcatcatcatcatcacagcagcggcctggtgccgcgcggcagccatatgactttaaatattgaggatgagcatcgtttacatgagacatcaaaagaacccgacgtgagcttagggtcaacgtggctttctgacttcccccaggcgtgggcggagactggcggaatggggttagctgtccgccaagcaccgttgatcatcccgttaaaggcaacgtctacacctgtctctatcaaacagtaccccatgagtcgtgaggcccgcctggggattaagccacatattcgtcgcttgtatgaccaggggatcttggtcccatgtcaatctccgtggaacaccccccttcgtcccgtgaaaaagccaggtacaaacgattatcgtccagttcaagatcttcgcgaggtcaacaaacgcgtagaagacatccatccgactgtacctaatccttataatctgttatcaggcctgcccccatcgcaccaatggtatacagtattagacttgaaagacgcgttcttttgcctgcgtctgcacccaacgtctcagccgctgtttgcgttcgaatgggaggatcctgaaatgggaatttcgggtcagttaacctggactcgtctgccccagggctttaaaaacagccccacattgttcgatgaagcacttcaccgtgacttagcagacttccgtatccaacacccagacttaattctgttacagtatgttgacgaccttttgttggcggcaacgtctgaacttgactgtcagcaaggcacacgcgcgttattacaaacgttaggtaacttaggatatcgtgcgtccgcgaaaaaggcgcaaatttgtcaaaaacaggtaaagtaccttgggtatttgctgaaagaaggtcaacgttggattactgatgcgcgtaaggagaccgtaatggggcagcctacgcctaagacgccacgcgaattgcgtgaatttttgggcaaagcgggattctgtcgtttatggattcctgggttcgctgaaatggctgcacccctgtaccccttaacaaaaacagggacgcttttcaactgggggccagaccagcaaaaggcgtatcaggagatcaaacaagctttgttgaccgcacccgcgttgggtcttccggatttaaccaagccctttgagctgttcgttgatgaaaaacagggatatgcaaaaggagtattaacccaaaagttaggcccgtggcgtcgccctgttgcttacttgagtaaaaaattggatcctgtcgcagcaggatggccaccgtgcttgcgtatggtcgcggcaattgccgttttgacaaaggatgcaggtaagttgacgatgggtcaacccttaaacatccatgctccacatgctgtagaagcgttagtaaagcagcccccagaccgctggctttctaatgcgcgcatgacccactatcaggcgcttctgcttgatacggatcgtgtacaatttggaccagttgtagctttgaatccagctactttgcttccccttccagaagaaggacttcagcacaattgtttagatattctggccgaggcacatgggacgcgccctgatttgacggatcagccactgcctgatgccgaccatacatggtatactggcggcagtagtcttcttcaagaggggcaacgcaaggcgggagcagccgtcactacggagaccgaagttatctgggccaaagcgttacccgcgggaacatccgcgcaacgtgcacagttaatcgctctgacacaggccctgaagatggcagagggcaaaaagttgaatgtctacaccaactcacgttatgcttttgcaacagcgcattggcatggcgaaatttaccgccgccgtggtctgctgactagtgagggtaaggaaattaaaaataaagatgagattcttgcgttgttaaaagctttattcttaccaaaacgcctttcgatcattcattgcccggggcatcaaaagggtcactcagcggaggctcgtggaaaccgtatggcggaccaagctgcccgtaaggcggcgatcacagagaccccggatacatcaacgctgttgatcgaaaacagctctccctacactagcgagcatttttaa

SEQ ID NO: 227 - DNA, 2115 bp, synthetic construct
  source 1..2115: mol_type = other DNA
atgggcagcagccatcatcatcatcatcacagcagcggcctggtgccgcgcggcagccatatgactttaaatattgaggatgagcatcgtttacatgagacatcaaaagaacccgacgtgagcttagggtcaacgtggctttctgacttcccccaggcgtgggcggagactggcggaatggggttagctgtccgccaagcaccgttgatcatcccgttaaaggcaacgtctacacctgtctctatcaaacagtaccccatgagtcgtgaggcccgcctggggattaagccacatattcgtcgcttgtatgaccaggggatcttggtcccatgtcaatctccgtggaacaccccccttcgtcccgtgaaaaagccaggtacaaacgattatcgtccagttcaagatcttcgcgaggtcaacaaacgcgtagaagacatccatccgactgtacctaatccttataatctgttatcaggcctgcccccatcgcaccaatggtatacagtattagacttgaaagacgcgttcttttgcctgcgtctgcacccaacgtctcagccgctgtttgcgttcgaatgggaggatcctgaaatgggaatttcgggtcagttaacctggactcgtctgccccagggctttaaaaacagccccacattgttcgatgaagcacttcaccgtgacttagcagacttccgtatccaacacccagacttaattctgttacagtatgttgacgaccttttgttggcggcaacgtctgaacttgactgtcagcaaggcacacgcgcgttattacaaacgttaggtaacttaggatatcgtgcgtccgcgaaaaaggcgcaaatttgtcaaaaacaggtaaagtaccttgggtatttgctgaaagaaggtcaacgttggattactgatgcgcgtaaggagaccgtaatggggcagcctacgcctaagacgccacgcgaattgcgtgaatttttgggcaaagcgggattctgtcgtttatggattcctgggttcgctgaaatggctgcacccctgtaccccttaacaaaaacagggacgcttttcaactgggggccagaccagcaaaaggcgtatcaggagatcaaacaagctttgttgaccgcacccgcgttgggtcttccggatttaaccaagccctttgagctgttcgttgatgaaaaacagggatatgcaaaaggagtattaacccaaaagttaggcccgtggcgtcgccctgttgcttacttgagtaaaaaattggatcctgtcgcagcaggatggccaccgtgcttgcgtatggtcgcggcaattgccgttttgacaaaggatgcaggtaagttgacgatgggtcaacccttaaacatcttggctccacatgctgtagaagcgttagtaaagcagcccccagaccgctggctttctaatgcgcgcatgacccactatcaggcgcttctgcttgataacgatcgtgtacaatttggaccagttgtagctttgaatccagctactttgcttccccttccagaagaaggacttcagcacaattgtttagatattctggccgaggcacatgggacgcgccctgatttgacggatcagccactgcctgatgccgaccatacatggtatactggcggcagtagtcttcttcaagaggggcaacgcaaggcgggagcagccgtcactacggagaccgaagttatctgggccaaagcgttacccgcgggaacatccgcgcaacgtgcacagttaatcgctctgacacaggccctgaagatggcagagggcaaaaagttgaatgtctacaccaactcacgttatgcttttgcaacagcgcattggcatggcgaaatttaccgccgccgtggtctgctgactagtgagggtaaggaaattaaaaataaagatgagattcttgcgttgttaaaagctttattcttaccaaaacgcctttcgatcattcattgcccggggcatcaaaagggtcactcagcggaggctcgtggaaaccgtatggcggaccaagctgcccgtaaggcggcgatcacagagaccccggatacatcaacgctgttgatcgaaaacagctctccctacactagcgagcatttttaa

SEQ ID NO: 228 - DNA, 2115 bp, synthetic construct
  source 1..2115: mol_type = other DNA
atgggcagcagccatcatcatcatcatcacagcagcggcctggtgccgcgcggcagccatatgactttaaatattgaggatgagcatcgtttacatgagacatcaaaagaacccgacgtgagcttagggtcaacgtggctttctgacttcccccaggcgtgggcggagactggcggaatggggttagctgtccgccaagcaccgttgatcatcccgttaaaggcaacgtctacacctgtctctatcaaacagtaccccatgagtcgtgaggcccgcctggggattaagccacatattcgtcgcttgtatgaccaggggatcttggtcccatgtcaatctccgtggaacaccccccttcgtcccgtgaaaaagccaggtacaaacgattatcgtccagttcaagatcttcgcgaggtcaacaaacgcgtagaagacatccatccgactgtacctaatccttataatctgttatcaggcctgcccccatcgcaccaatggtatacagtattagacttgaaagacgcgttcttttgcctgcgtctgcacccaacgtctcagccgctgtttgcgttcgaatgggaggatcctgaaatgggaatttcgggtcagttaacctggactcgtctgccccagggctttaaaaacagccccacattgttcgatgaagcacttcaccgtgacttagcagacttccgtatccaacacccagacttaattctgttacagtatgttgacgaccttttgttggcggcaacgtctgaacttgactgtcagcaaggcacacgcgcgttattacaaacgttaggtaacttaggatatcgtgcgtccgcgaaaaaggcgcaaatttgtcaaaaacaggtaaagtaccttgggtatttgctgaaagaaggtcaacgttggattactgatgcgcgtaaggagaccgtaatggggcagcctacgcctaagacgccacgcgaattgcgtgaatttttgggcaaagcgggattctgtcgtttatggattcctgggttcgctgaaatggctgcacccctgtaccccttaacaaaaacagggacgcttttcaactgggggccagaccagcaaaaggcgtatcaggagatcaaacaagctttgttgaccgcacccgcgttgggtcttccggatttaaccaagccctttgagctgttcgttgatgaaaaacagggatatgcaaaaggagtattaacccaaaagttaggcccgtggcgtcgccctgttgcttacttgagtaaaaaattggatcctgtcgcagcaggatggccaccgtgcttgcgtatggtcgcggcaattgccgttttgacaaaggatgcaggtaagttgacgatgggtcaacccttaaacatcttggctccacatgctgtagaagcgttagtaaagcagcccccagaccgctggctttctaatgcgcgcatgacccactatcaggcgcttctgcttgatacggatcgtgtacaatttggaccagttgtagctttgaatccagctactttgcttccccttccagaagaagcgcttcagcacaattgtttagatattctggccgaggcacatgggacgcgccctgatttgacggatcagccactgcctgatgccgaccatacatggtatactggcggcagtagtcttcttcaagaggggcaacgcaaggcgggagcagccgtcactacggagaccgaagttatctgggccaaagcgttacccgcgggaacatccgcgcaacgtgcacagttaatcgctctgacacaggccctgaagatggcagagggcaaaaagttgaatgtctacaccaactcacgttatgcttttgcaacagcgcattggcatggcgaaatttaccgccgccgtggtctgctgactagtgagggtaaggaaattaaaaataaagatgagattcttgcgttgttaaaagctttattcttaccaaaacgcctttcgatcattcattgcccggggcatcaaaagggtcactcagcggaggctcgtggaaaccgtatggcggaccaagctgcccgtaaggcggcgatcacagagaccccggatacatcaacgctgttgatcgaaaacagctctccctacactagcgagcatttttaa

SEQ ID NO: 229 - DNA, 1569 bp, synthetic construct
  source 1..1569: mol_type = other DNA
atgggcagcagccatcatcatcatcatcacagcagcggcctggtgccgcgcggcagccatatgactttaaatattgaggatgagcatcgtttacatgagacatcaaaagaacccgacgtgagcttagggtcaacgtggctttctgacttcccccaggcgtgggcggagactggcggaatggggttagctgtccgccaagcaccgttgatcatcccgttaaaggcaacgtctacacctgtctctatcaaacagtaccccatgagtcgtgaggcccgcctggggattaagccacatattcgtcgcttgtatgaccaggggatcttggtcccatgtcaatctccgtggaacaccccccttcgtcccgtgaaaaagccaggtacaaacgattatcgtccagttcaagatcttcgcgaggtcaacaaacgcgtagaagacatccatccgactgtacctaatccttataatctgttatcaggcctgcccccatcgcaccaatggtatacagtattagacttgaaagacgcgttcttttgcctgcgtctgcacccaacgtctcagccgctgtttgcgttcgaatgggaggatcctgaaatgggaatttcgggtcagttaacctggactcgtctgccccagggctttaaaaacagccccacattgttcgatgaagcacttcaccgtgacttagcagacttccgtatccaacacccagacttaattctgttacagtatgttgacgaccttttgttggcggcaacgtctgaacttgactgtcagcaaggcacacgcgcgttattacaaacgttaggtaacttaggatatcgtgcgtccgcgaaaaaggcgcaaatttgtcaaaaacaggtaaagtaccttgggtatttgctgaaagaaggtcaacgttggattactgatgcgcgtaaggagaccgtaatggggcagcctacgcctaagacgccacgcgaattgcgtgaatttttgggcaaagcgggattctgtcgtttatggattcctgggttcgctgaaatggctgcacccctgtaccccttaacaaaaacagggacgcttttcaactgggggccagaccagcaaaaggcgtatcaggagatcaaacaagctttgttgaccgcacccgcgttgggtcttccggatttaaccaagccctttgagctgttcgttgatgaaaaacagggatatgcaaaaggagtattaacccaaaagttaggcccgtggcgtcgccctgttgcttacttgagtaaaaaattggatcctgtcgcagcaggatggccaccgtgcttgcgtatggtcgcggcaattgccgttttgacaaaggatgcaggtaagttgacgatgggtcaacccttaaacatcttggctccacatgctgtagaagcgttagtaaagcagcccccagaccgctggctttctaatgcgcgcatgacccactatcaggcgcttctgcttgatacggatcgtgtacaatttggaccagttgtagctttgaatccagctactttgcttccccttccagaagaaggacttcagcacaattgtttagatattctggccgagtaa

SEQ ID NO: 230 - DNA, 2115 bp, synthetic construct
  source 1..2115: mol_type = other DNA
atgggcagcagccatcatcatcatcatcacagcagcggcctggtgccgcgcggcagccatatgactttaaatattgaggatgagcatcgtttacatgagacatcaaaagaacccgacgtgagcttagggtcaacgtggctttctgacttcccccaggcgtgggcggagactggcggaatggggttagctgtccgccaagcaccgttgatcatcccgttaaaggcaacgtctacacctgtctctatcaaacagtaccccatgagtcgtgaggcccgcctggggattaagccacatattcgtcgcttgtatgaccaggggatcttggtcccatgtcaatctccgtggaacaccccccttcgtcccgtgaaaaagccaggtacaaacgattatcgtccagttcaagatcttcgcgaggtcaacaaacgcgtagaagacatccatccgactgtacctaatccttataatctgttatcaggcctgcccccatcgcaccaatggtatacagtattagacttgaaagacgcgttcttttgcctgcgtctgcacccaacgtctcagccgctgtttgcgttcgaatgggaggatcctgaaatgggaatttcgggtcagttaacctggactcgtctgccccagggctttaaaaacagccccacattgttcgatgaagcacttcaccgtgacttagcagacttccgtatccaacacccagacttaattctgttacagtatgttgacgaccttttgttggcggcaacgtctgaacttgactgtcagcaaggcacacgcgcgttattacaaacgttaggtaacttaggatatcgtgcgtccgcgaaaaaggcgcaaatttgtcaaaaacaggtaaagtaccttgggtatttgctgaaagaaggtcaacgttggattactgatgcgcgtaaggagaccgtaatggggcagcctacgcctaagacgccacgcgaattgcgtgaatttttgggcaaagcgggattctgtcgtttatggattcctgggttcgctgaaatggctgcacccctgtaccccttaacaaaaacagggacgcttttcaactgggggccagaccagcaaaaggcgtatcaggagatcaaacaagctttgttgaccgcacccgcgttgggtcttccggatttaaccaagccctttgagctgttcgttgatgaaaaacagggatatgcaaaaggagtattaacccaaaagttaggcccgtggcgtcgccctgttgcttacttgagtaaaaaattggatcctgtcgcagcaggatggccaccgtgcttgcgtatggtcgcggcaattgccgttttgacaaaggatgcaggtaagttgacgatgggtcaacccttaaacatcttggctccacatgctgtagaagcgttagtaaagcagcccccagaccgctggctttctaatgcgcgcatgacccactatcaggcgcttctgcttgatacggatcgtgtacaatttggaccagttgtagctttgaatccagctactttgcttccccttccagaagaaggacttcagcacaattgtttagatattctggccgaggcacatgggacgcgccctgatttgacggatcagccactgcctgatgccgaccatacatggtatactggcggcagtagttatcttcaagaggggcaacgcaaggcgggagcagccgtcactacggagaccgaagttatctgggccaaagcgttacccgcgggaacatccgcgcaacgtgcacagttaatcgctctgacacaggccctgaagatggcagagggcaaaaagttgaatgtctacaccaactcacgttatgcttttgcaacagcgcattggcatggcgaaatttaccgccgccgtggtctgctgactagtgagggtaaggaaattaaaaataaagatgagattcttgcgttgttaaaagctttattcttaccaaaacgcctttcgatcattcattgcccggggcatcaaaagggtcactcagcggaggctcgtggaaaccgtatggcggaccaagctgcccgtaaggcggcgatcacagagaccccggatacatcaacgctgttgatcgaaaacagctctccctacactagcgagcatttttaa

SEQ ID NO: 231 - DNA, 2115 bp, synthetic construct
  source 1..2115: mol_type = other DNA
atgggcagcagccatcatcatcatcatcacagcagcggcctggtgccgcgcggcagccatatgactttaaatattgaggatgagcatcgtttacatgagacatcaaaagaacccgacgtgagcttagggtcaacgtggctttctgacttcccccaggcgtgggcggagactggcggaatggggttagctgtccgccaagcaccgttgatcatcccgttaaaggcaacgtctacacctgtctctatcaaacagtaccccatgagtcgtgaggcccgcctggggattaagccacatattcgtcgcttgtatgaccaggggatcttggtcccatgtcaatctccgtggaacaccccccttcgtcccgtgaaaaagccaggtacaaacgattatcgtccagttcaagatcttcgcgaggtcaacaaacgcgtagaagacatccatccgactgtacctaatccttataatctgttatcaggcctgcccccatcgcaccaatggtatacagtattagacttgaaagacgcgttcttttgcctgcgtctgcacccaacgtctcagccgctgtttgcgttcgaatgggaggatcctgaaatgggaatttcgggtcagttaacctggactcgtctgccccagggctttaaaaacagccccacattgttcgatgaagcacttcaccgtgacttagcagacttccgtatccaacacccagacttaattctgttacagtatgttgacgaccttttgttggcggcaacgtctgaacttgactgtcagcaaggcacacgcgcgttattacaaacgttaggtaacttaggatatcgtgcgtccgcgaaaaaggcgcaaatttgtcaaaaacaggtaaagtaccttgggtatttgctgaaagaaggtcaacgttggattactgatgcgcgtaaggagaccgtaatggggcagcctacgcctaagacgccacgcgaattgcgtgaatttttgggcaaagcgggattctgtcgtttatggattcctgggttcgctgaaatggctgcacccctgtaccccttaacaaaaacagggacgcttttcaactgggggccagaccagcaaaaggcgtatcaggagatcaaacaagctttgttgaccgcacccgcgttgggtcttccggatttaaccaagccctttgagctgttcgttgatgaaaaacagggatatgcaaaaggagtattaacccaaaagttaggcccgtggcgtcgccctgttgcttacttgagtaaaaaattggatcctgtcgcagcaggatggccaccgtgcttgcgtatggtcgcggcaattgccgttttgacaaaggatgcaggtaagttgacgatgggtcaacccttaaacatcttggctccacatgctgtagaagcgttagtaaagcagcccccagaccgctggctttctaatgcgcgcatgacccactatcaggcgcttctgcttgatacggatcgtgtacaatttggaccagttgtagctttgaatccagctactttgcttccccttccagaagaaggacttcagcacaattgtttagatattctggccgaggcacatgggacgcgccctgatttgacggatcagccactgcctgatgccgaccatacatggtatactggcggcagtagtcttcttcaagaggggcaacgcaaggcgggagcagccgtcactacggagaccgaagttatctgggccaaagcgttacccgcgggaacatccgcgcaacgtgcacagttaatcgctctgacacaggccctgaagatggcagagggcaaaaagttgaatgtctacaccaactcacgttatgcttttgcaacagcgcattggcatggcgaaatttaccgccgccgtggtctgctgactagtgagggtaaggaaattaaaaataaagatgagattcttgcgttgttaaaagctttattcttaccaaaaatgctttcgatcattcattgcccggggcatcaaaagggtcactcagcggaggctcgtggaaaccgtatggcggaccaagctgcccgtaaggcggcgatcacagagaccccggatacatcaacgctgttgatcgaaaacagctctccctacactagcgagcatttttaa

SEQ ID NO: 232 - DNA, 2115 bp, synthetic construct
  source 1..2115: mol_type = other DNA
atgggcagcagccatcatcatcatcatcacagcagcggcctggtgccgcgcggcagccatatgactttaaatattgaggatgagcatcgtttacatgagacatcaaaagaacccgacgtgagcttagggtcaacgtggctttctgacttcccccaggcgtgggcggagactggcggaatggggttagctgtccgccaagcaccgttgatcatcccgttaaaggcaacgtctacacctgtctctatcaaacagtaccccatgagtcgtgaggcccgcctggggattaagccacatattcgtcgcttgtatgaccaggggatcttggtcccatgtcaatctccgtggaacaccccccttcgtcccgtgaaaaagccaggtacaaacgattatcgtccagttcaagatcttcgcgaggtcaacaaacgcgtagaagacatccatccgactgtacctaatccttataatctgttatcaggcctgcccccatcgcaccaatggtatacagtattagacttgaaagacgcgttcttttgcctgcgtctgcacccaacgtctcagccgctgtttgcgttcgaatgggaggatcctgaaatgggaatttcgggtcagttaacctggactcgtctgccccagggctttaaaaacagccccacattgttcgatgaagcacttcaccgtgacttagcagacttccgtatccaacacccagacttaattctgttacagtatgttgacgaccttttgttggcggcaacgtctgaacttgactgtcagcaaggcacacgcgcgttattacaaacgttaggtaacttaggatatcgtgcgtccgcgaaaaaggcgcaaatttgtcaaaaacaggtaaagtaccttgggtatttgctgaaagaaggtcaacgttggattactgatgcgcgtaaggagaccgtaatggggcagcctacgcctaagacgccacgcgaattgcgtgaatttttgggcaaagcgggattctgtcgtttatggattcctgggttcgctgaaatggctgcacccctgtaccccttaacaaaaacagggacgcttttcaactgggggccagaccagcaaaaggcgtatcaggagatcaaacaagctttgttgaccgcacccgcgttgggtcttccggatttaaccaagccctttgagctgttcgttgatgaaaaacagggatatgcaaaaggagtattaacccaaaagttaggcccgtggcgtcgccctgttgcttacttgagtaaaaaattggatcctgtcgcagcaggatggccaccgtgcttgcgtatggtcgcggcaattgccgttttgacaaaggatgcaggtaagttgacgatgggtcaacccttaaacatcttggctccacatgctgtagaagcgttagtaaagcagcccccagaccgctggctttctaatgcgcgcatgacccactatcaggcgcttctgcttgatacggatcgtgtacaatttggaccagttgtagctttgaatccagctactttgcttccccttccagaagaaggacttcagcacaattgtttagatattctggccgaggcacatgggacgcgccctgatttgacggatcagccactgcctgatgccgaccatacatggtatactggcggcagtagtcttcttcaagaggggcaacgcaaggcgggagcagccgtcactacggagaccgaagttatctgggccaaagcgttacccgcgggaacatccgcgcaacgtgcacagttaatcgctctgacacaggccctgaagatggcagagggcaaaaagttgaatgtctacaccaactcacgttatgcttttgcaacagcgcattggcatggcgaaatttaccgccgccgtggtctgctgactagtgagggtaaggaaattaaaaataaagatgagattcttgcgttgttaaaagctttattcttaccaaaacgcctttcgatcattcattgcccggggcatcaaaagggtcactcagcggaggtacgtggaaaccgtatggcggaccaagctgcccgtaaggcggcgatcacagagaccccggatacatcaacgctgttgatcgaaaacagctctccctacactagcgagcatttttaa

SEQ ID NO: 233 - DNA, 2115 bp, synthetic construct
  source 1..2115: mol_type = other DNA
atgggcagcagccatcatcatcatcatcacagcagcggcctggtgccgcgcggcagccatatgactttaaatattgaggatgagcatcgtttacatgagacatcaaaagaacccgacgtgagcttagggtcaacgtggctttctgacttcccccaggcgtgggcggagactggcggaatggggttagctgtccgccaagcaccgttgatcatcccgttaaaggcaacgtctacacctgtctctatcaaacagtaccccatgagtcgtgaggcccgcctggggattaagccacatattcgtcgcttgtatgaccaggggatcttggtcccatgtcaatctccgtggaacaccccccttcgtcccgtgaaaaagccaggtacaaacgattatcgtccagttcaagatcttcgcgaggtcaacaaacgcgtagaagacatccatccgactgtacctaatccttataatctgttatcaggcctgcccccatcgcaccaatggtatacagtattagacttgaaagacgcgttcttttgcctgcgtctgcacccaacgtctcagccgctgtttgcgttcgaatggcgtgatcctgaaatgggaatttcgggtcagttaacctggactcgtctgccccagggctttaaaaacagccccacattgttcgatgaagcacttcaccgtgacttagcagacttccgtatccaacacccagacttaattctgttacagtatgttgacgaccttttgttggcggcaacgtctgaacttgactgtcagcaaggcacacgcgcgttattacaaacgttaggtaacttaggatatcgtgcgtccgcgaaaaaggcgcaaatttgtcaaaaacaggtaaagtaccttgggtatttgctgaaagaaggtcaacgttggattactgatgcgcgtaaggaggatgtaatggggcagcctacgcctaagacgccacgcgaattgcgtgaatttttgggcaaagcgggattctgtcgtttatggattcctgggttcgctgaaatggctgcacccctgtaccccttaacaaaaacagggacgcttttcaactgggggccagaccagcaaaaggcgtatcaggagatcaaacaagctttgttgaccgcacccgcgttgggtcttccggatttaaccaagccctttgagctgttcgttgatgaaaaacagggatatgcaaaaggagtattaacccaaaagttaggcccgtggcgtcgccctgttgcttacttgagtaaaaaattggatcctgtcgcagcaggatggccaccgtgcttgcgtatggtcgcggcaattgccgttttgacaaaggatgcaggtaagttgacgatgggtcaacccttaacaatcttggctccacatgctgtagaagcgttagtaaagcagcccccagaccgctggctttctaatgcgcgcatgacccactatcaggcgcttctgcttgatacggatcgtgtacaatttggaccagttgtagctttgaatccagctactttgcttccccttccagaagaaggacttcagcacaattgtttagatattctggccgaggcacatgggacgcgccctgatttgacggatcagccactgcctgatgccgaccatacatggtatactggcggcagtagtcttcttcaagaggggcaacgcaaggcgggagcagccgtcactacggagaccgaagttatctgggccaaagcgttacccgcgggaacatccgcgcaacgtgcacagttaatcgctctgacacaggccctgaagatggcagagggcaaaaagttgaatgtctacaccaactcacgttatgcttttgcaacagcgcattggcatggcgaaatttaccgccgccgtggtctgctgactagtgagggtaaggaaattaaaaataaagatgagattcttgcgttgttaaaagctttattcttaccaaaacgcctttcgatcattcattgcccggggcatcaaaagggtcactcagcggaggctcgtggaaaccgtatggcggaccaagctgcccgtaaggcggcgatcacagagaccccggatacatcaacgctgttgatcgaaaacagctctccctacactagcgagcatttttaa

SEQ ID NO: 234 - DNA, 2115 bp, synthetic construct
  source 1..2115: mol_type = other DNA
atgggcagcagccatcatcatcatcatcacagcagcggcctggtgccgcgcggcagccatatgactttaaatattgaggatgagcatcgtttacatgagacatcaaaagaacccgacgtgagcttagggtcaacgtggctttctgacttcccccaggcgtgggcggagactggcggaatggggttagctgtccgccaagcaccgttgatcatcccgttaaaggcaacgtctacacctgtctctatcaaacagtaccccatgagtcgtgaggcccgcctggggattaagccacatattcgtcgcttgtatgaccaggggatcttggtcccatgtcaatctccgtggaacaccccccttcgtcccgtgaaaaagccaggtacaaacgattatcgtccagttcaagatcttcgcgaggtcaacaaacgcgtagaagacatccatccgactgtacctaatccttataatctgttatcaggcctgcccccatcgcaccaatggtatacagtattagacttgaaagacgcgttcttttgcctgcgtctgcacccaacgtctcagccgctgtttgcgttcgaatggcgtgatcctgaaatgggaatttcgggtcagttaacctggactcgtctgccccagggctttaaaaacagccccacattgttcgatgaagcacttcaccgtgacttagcagacttccgtatccaacacccagacttaattctgttacagtatgttgacgaccttttgttggcggcaacgtctgaacttgactgtcagcaaggcacacgcgcgttattacaaacgttaggtaacttaggatatcgtgcgtccgcgaaaaaggcgcaaatttgtcaaaaacaggtaaagtaccttgggtatttgctgaaagaaggtcaacgttggattactgatgcgcgtaaggaggatgtaatggggcagcctacgcctaagacgccacgcgaattgcgtgaatttttgggcaaagcgggattctgtcgtttatggattcctgggttcgctgaaatggctgcacccctgtaccccttaacaaaaacagggacgcttttcaactgggggccagaccagcaaaaggcgtatcaggagatcaaacaagctttgttgaccgcacccgcgttgggtcttccggatttaaccaagccctttgagctgttcgttgatgaaaaacagggatatgcaaaaggagtattaacccaaaagttaggcccgtggcgtcgccctgttgcttacttgagtaaaaaattggatcctgtcgcagcaggatggccaccgtgcttgcgtatggtcgcggcaattgccgttttgacaaaggatgcaggtaagttgacgatgggtcaacccttaaacatcttggctccacatgctgtagaagcgttagtaaagcagcccccagaccgctggctttctaatgcgcgcatgacccactatcaggcgcttctgcttgataacgatcgtgtacaatttggaccagttgtagctttgaatccagctactttgcttccccttccagaagaaggacttcagcacaattgtttagatattctggccgaggcacatgggacgcgccctgatttgacggatcagccactgcctgatgccgaccatacatggtatactggcggcagtagtcttcttcaagaggggcaacgcaaggcgggagcagccgtcactacggagaccgaagttatctgggccaaagcgttacccgcgggaacatccgcgcaacgtgcacagttaatcgctctgacacaggccctgaagatggcagagggcaaaaagttgaatgtctacaccaactcacgttatgcttttgcaacagcgcattggcatggcgaaatttaccgccgccgtggtctgctgactagtgagggtaaggaaattaaaaataaagatgagattcttgcgttgttaaaagctttattcttaccaaaacgcctttcgatcattcattgcccggggcatcaaaagggtcactcagcggaggctcgtggaaaccgtatggcggaccaagctgcccgtaaggcggcgatcacagagaccccggatacatcaacgctgttgatcgaaaacagctctccctacactagcgagcatttttaa

SEQ ID NO: 235 - DNA, 1569 bp, synthetic construct
  source 1..1569: mol_type = other DNA
atgggcagcagccatcatcatcatcatcacagcagcggcctggtgccgcgcggcagccatatgactttaaatattgaggatgagcatcgtttacatgagacatcaaaagaacccgacgtgagcttagggtcaacgtggctttctgacttcccccaggcgtgggcggagactggcggaatggggttagctgtccgccaagcaccgttgatcatcccgttaaaggcaacgtctacacctgtctctatcaaacagtaccccatgagtcgtgaggcccgcctggggattaagccacatattcgtcgcttgtatgaccaggggatcttggtcccatgtcaatctccgtggaacaccccccttcgtcccgtgaaaaagccaggtacaaacgattatcgtccagttcaagatcttcgcgaggtcaacaaacgcgtagaagacatccatccgactgtacctaatccttataatctgttatcaggcctgcccccatcgcaccaatggtatacagtattagacttgaaagacgcgttcttttgcctgcgtctgcacccaacgtctcagccgctgtttgcgttcgaatggcgtgatcctgaaatgggaatttcgggtcagttaacctggactcgtctgccccagggctttaaaaacagccccacattgttcgatgaagcacttcaccgtgacttagcagacttccgtatccaacacccagacttaattctgttacagtatgttgacgaccttttgttggcggcaacgtctgaacttgactgtcagcaaggcacacgcgcgttattacaaacgttaggtaacttaggatatcgtgcgtccgcgaaaaaggcgcaaatttgtcaaaaacaggtaaagtaccttgggtatttgctgaaagaaggtcaacgttggattactgatgcgcgtaaggaggatgtaatggggcagcctacgcctaagacgccacgcgaattgcgtgaatttttgggcaaagcgggattctgtcgtttatggattcctgggttcgctgaaatggctgcacccctgtaccccttaacaaaaacagggacgcttttcaactgggggccagaccagcaaaaggcgtatcaggagatcaaacaagctttgttgaccgcacccgcgttgggtcttccggatttaaccaagccctttgagctgttcgttgatgaaaaacagggatatgcaaaaggagtattaacccaaaagttaggcccgtggcgtcgccctgttgcttacttgagtaaaaaattggatcctgtcgcagcaggatggccaccgtgcttgcgtatggtcgcggcaattgccgttttgacaaaggatgcaggtaagttgacgatgggtcaacccttaaacatcttggctccacatgctgtagaagcgttagtaaagcagcccccagaccgctggctttctaatgcgcgcatgacccactatcaggcgcttctgcttgatacggatcgtgtacaatttggaccagttgtagctttgaatccagctactttgcttccccttccagaagaaggacttcagcacaattgtttagatattctggccgagtaa

SEQ ID NO: 236 - DNA, 2115 bp, synthetic construct
  source 1..2115: mol_type = other DNA
atgggcagcagccatcatcatcatcatcacagcagcggcctggtgccgcgcggcagccatatgactttaaatattgaggatgagcatcgtttacatgagacatcaaaagaacccgacgtgagcttagggtcaacgtggctttctgacttcccccaggcgtgggcggagactggcggaatggggttagctgtccgccaagcaccgttgatcatcccgttaaaggcaacgtctacacctgtctctatcaaacagtaccccatgagtcgtgaggcccgcctggggattaagccacatattcgtcgcttgtatgaccaggggatcttggtcccatgtcaatctccgtggaacaccccccttcgtcccgtgaaaaagccaggtacaaacgattatcgtccagttcaagatcttcgcgaggtcaacaaacgcgtagaagacatccatccgactgtacctaatccttataatctgttatcaggcctgcccccatcgcaccaatggtatacagtattagacttgaaagacgcgttcttttgcctgcgtctgcacccaacgtctcagccgctgtttgcgttcgaatggcgtgatcctgaaatgggaatttcgggtcagttaacctggactcgtctgccccagggctttaaaaacagccccacattgttcgatgaagcacttcaccgtgacttagcagacttccgtatccaacacccagacttaattctgttacagtatgttgacgaccttttgttggcggcaacgtctgaacttgactgtcagcaaggcacacgcgcgttattacaaacgttaggtaacttaggatatcgtgcgtccgcgaaaaaggcgcaaatttgtcaaaaacaggtaaagtaccttgggtatttgctgaaagaaggtcaacgttggattactgatgcgcgtaaggaggatgtaatggggcagcctacgcctaagacgccacgcgaattgcgtgaatttttgggcaaagcgggattctgtcgtttatggattcctgggttcgctgaaatggctgcacccctgtaccccttaacaaaaacagggacgcttttcaactgggggccagaccagcaaaaggcgtatcaggagatcaaacaagctttgttgaccgcacccgcgttgggtcttccggatttaaccaagccctttgagctgttcgttgatgaaaaacagggatatgcaaaaggagtattaacccaaaagttaggcccgtggcgtcgccctgttgcttacttgagtaaaaaattggatcctgtcgcagcaggatggccaccgtgcttgcgtatggtcgcggcaattgccgttttgacaaaggatgcaggtaagttgacgatgggtcaacccttaaacatcttggctccacatgctgtagaagcgttagtaaagcagcccccagaccgctggctttctaatgcgcgcatgacccactatcaggcgcttctgcttgatacggatcgtgtacaatttggaccagttgtagctttgaatccagctactttgcttccccttccagaagaaggacttcagcacaattgtttagatattctggccgaggcacatgggacgcgccctgatttgacggatcagccactgcctgatgccgaccatacatggtatactggcggcagtagttatcttcaagaggggcaacgcaaggcgggagcagccgtcactacggagaccgaagttatctgggccaaagcgttacccgcgggaacatccgcgcaacgtgcacagttaatcgctctgacacaggccctgaagatggcagagggcaaaaagttgaatgtctacaccaactcacgttatgcttttgcaacagcgcattggcatggcgaaatttaccgccgccgtggtctgctgactagtgagggtaaggaaattaaaaataaagatgagattcttgcgttgttaaaagctttattcttaccaaaacgcctttcgatcattcattgcccggggcatcaaaagggtcactcagcggaggctcgtggaaaccgtatggcggaccaagctgcccgtaaggcggcgatcacagagaccccggatacatcaacgctgttgatcgaaaacagctctccctacactagcgagcatttttaa

SEQ ID NO: 237 - DNA, 2115 bp, synthetic construct
  source 1..2115: mol_type = other DNA
atgggcagcagccatcatcatcatcatcacagcagcggcctggtgccgcgcggcagccatatgactttaaatattgaggatgagcatcgtttacatgagacatcaaaagaacccgacgtgagcttagggtcaacgtggctttctgacttcccccaggcgtgggcggagactggcggaatggggttagctgtccgccaagcaccgttgatcatcccgttaaaggcaacgtctacacctgtctctatcaaacagtaccccatgagtcgtgaggcccgcctggggattaagccacatattcgtcgcttgtatgaccaggggatcttggtcccatgtcaatctccgtggaacaccccccttcgtcccgtgaaaaagccaggtacaaacgattatcgtccagttcaagatcttcgcgaggtcaacaaacgcgtagaagacatccatccgactgtacctaatccttataatctgttatcaggcctgcccccatcgcaccaatggtatacagtattagacttgaaagacgcgttcttttgcctgcgtctgcacccaacgtctcagccgctgtttgcgttcgaatggcgtgatcctgaaatgggaatttcgggtcagttaacctggactcgtctgccccagggctttaaaaacagccccacattgttcgatgaagcacttcaccgtgacttagcagacttccgtatccaacacccagacttaattctgttacagtatgttgacgaccttttgttggcggcaacgtctgaacttgactgtcagcaaggcacacgcgcgttattacaaacgttaggtaacttaggatatcgtgcgtccgcgaaaaaggcgcaaatttgtcaaaaacaggtaaagtaccttgggtatttgctgaaagaaggtcaacgttggattactgatgcgcgtaaggagaccgtaatggggcagcctacgcctaagacgccacgcgaattgcgtgaatttttgggcaaagcgggattctgtcgtttatggattcctgggttcgctgaaatggctgcacccctgtaccccttaacaaaaacagggacggagttcaactgggggccagaccagcaaaaggcgtatcaggagatcaaacaagctttgttgaccgcacccgcgttgggtcttccggatttaaccaagccctttgagctgttcgttgatgaaaaacagggatatgcaaaaggagtattaacccaaaagttaggcccgtggcgtcgccctgttgcttacttgagtaaaaaattggatcctgtcgcagcaggatggccaccgtgcttgcgtatggtcgcggcaattgccgttttgacaaaggatgcaggtaagttgacgatgggtcaacccttaacaatcttggctccacatgctgtagaagcgttagtaaagcagcccccagaccgctggctttctaatgcgcgcatgacccactatcaggcgcttctgcttgatacggatcgtgtacaatttggaccagttgtagctttgaatccagctactttgcttccccttccagaagaaggacttcagcacaattgtttagatattctggccgaggcacatgggacgcgccctgatttgacggatcagccactgcctgatgccgaccatacatggtatactggcggcagtagtcttcttcaagaggggcaacgcaaggcgggagcagccgtcactacggagaccgaagttatctgggccaaagcgttacccgcgggaacatccgcgcaacgtgcacagttaatcgctctgacacaggccctgaagatggcagagggcaaaaagttgaatgtctacaccaactcacgttatgcttttgcaacagcgcattggcatggcgaaatttaccgccgccgtggtctgctgactagtgagggtaaggaaattaaaaataaagatgagattcttgcgttgttaaaagctttattcttaccaaaacgcctttcgatcattcattgcccggggcatcaaaagggtcactcagcggaggctcgtggaaaccgtatggcggaccaagctgcccgtaaggcggcgatcacagagaccccggatacatcaacgctgttgatcgaaaacagctctccctacactagcgagcatttttaa

SEQ ID NO: 238 - DNA, 2115 bp, synthetic construct; identical to SEQ ID NO: 119
  source 1..2115: mol_type = other DNA

SEQ ID NO: 239 - DNA, 1569 bp, synthetic construct
  source 1..1569: mol_type = other DNA
atgggcagcagccatcatcatcatcatcacagcagcggcctggtgccgcgcggcagccatatgactttaaatattgaggatgagcatcgtttacatgagacatcaaaagaacccgacgtgagcttagggtcaacgtggctttctgacttcccccaggcgtgggcggagactggcggaatggggttagctgtccgccaagcaccgttgatcatcccgttaaaggcaacgtctacacctgtctctatcaaacagtaccccatgagtcgtgaggcccgcctggggattaagccacatattcgtcgcttgtatgaccaggggatcttggtcccatgtcaatctccgtggaacaccccccttcgtcccgtgaaaaagccaggtacaaacgattatcgtccagttcaagatcttcgcgaggtcaacaaacgcgtagaagacatccatccgactgtacctaatccttataatctgttatcaggcctgcccccatcgcaccaatggtatacagtattagacttgaaagacgcgttcttttgcctgcgtctgcacccaacgtctcagccgctgtttgcgttcgaatggcgtgatcctgaaatgggaatttcgggtcagttaacctggactcgtctgccccagggctttaaaaacagccccacattgttcgatgaagcacttcaccgtgacttagcagacttccgtatccaacacccagacttaattctgttacagtatgttgacgaccttttgttggcggcaacgtctgaacttgactgtcagcaaggcacacgcgcgttattacaaacgttaggtaacttaggatatcgtgcgtccgcgaaaaaggcgcaaatttgtcaaaaacaggtaaagtaccttgggtatttgctgaaagaaggtcaacgttggattactgatgcgcgtaaggagaccgtaatggggcagcctacgcctaagacgccacgcgaattgcgtgaatttttgggcaaagcgggattctgtcgtttatggattcctgggttcgctgaaatggctgcacccctgtaccccttaacaaaaacagggacggagttcaactgggggccagaccagcaaaaggcgtatcaggagatcaaacaagctttgttgaccgcacccgcgttgggtcttccggatttaaccaagccctttgagctgttcgttgatgaaaaacagggatatgcaaaaggagtattaacccaaaagttaggcccgtggcgtcgccctgttgcttacttgagtaaaaaattggatcctgtcgcagcaggatggccaccgtgcttgcgtatggtcgcggcaattgccgttttgacaaaggatgcaggtaagttgacgatgggtcaacccttaaacatcttggctccacatgctgtagaagcgttagtaaagcagcccccagaccgctggctttctaatgcgcgcatgacccactatcaggcgcttctgcttgatacggatcgtgtacaatttggaccagttgtagctttgaatccagctactttgcttccccttccagaagaaggacttcagcacaattgtttagatattctggccgagtaa

SEQ ID NO: 240 - DNA, 2115 bp, synthetic construct
  source 1..2115: mol_type = other DNA
atgggcagcagccatcatcatcatcatcacagcagcggcctggtgccgcgcggcagccatatgactttaaatattgaggatgagcatcgtttacatgagacatcaaaagaacccgacgtgagcttagggtcaacgtggctttctgacttcccccaggcgtgggcggagactggcggaatggggttagctgtccgccaagcaccgttgatcatcccgttaaaggcaacgtctacacctgtctctatcaaacagtaccccatgagtcgtgaggcccgcctggggattaagccacatattcgtcgcttgtatgaccaggggatcttggtcccatgtcaatctccgtggaacaccccccttcgtcccgtgaaaaagccaggtacaaacgattatcgtccagttcaagatcttcgcgaggtcaacaaacgcgtagaagacatccatccgactgtacctaatccttataatctgttatcaggcctgcccccatcgcaccaatggtatacagtattagacttgaaagacgcgttcttttgcctgcgtctgcacccaacgtctcagccgctgtttgcgttcgaatggcgtgatcctgaaatgggaatttcgggtcagttaacctggactcgtctgccccagggctttaaaaacagccccacattgttcgatgaagcacttcaccgtgacttagcagacttccgtatccaacacccagacttaattctgttacagtatgttgacgaccttttgttggcggcaacgtctgaacttgactgtcagcaaggcacacgcgcgttattacaaacgttaggtaacttaggatatcgtgcgtccgcgaaaaaggcgcaaatttgtcaaaaacaggtaaagtaccttgggtatttgctgaaagaaggtcaacgttggattactgatgcgcgtaaggagaccgtaatggggcagcctacgcctaagacgccacgcgaattgcgtgaatttttgggcaaagcgggattctgtcgtttatggattcctgggttcgctgaaatggctgcacccctgtaccccttaacaaaaacagggacggagttcaactgggggccagaccagcaaaaggcgtatcaggagatcaaacaagctttgttgaccgcacccgcgttgggtcttccggatttaaccaagccctttgagctgttcgttgatgaaaaacagggatatgcaaaaggagtattaacccaaaagttaggcccgtggcgtcgccctgttgcttacttgagtaaaaaattggatcctgtcgcagcaggatggccaccgtgcttgcgtatggtcgcggcaattgccgttttgacaaaggatgcaggtaagttgacgatgggtcaacccttaaacatcttggctccacatgctgtagaagcgttagtaaagcagcccccagaccgctggctttctaatgcgcgcatgacccactatcaggcgcttctgcttgatacggatcgtgtacaatttggaccagttgtagctttgaatccagctactttgcttccccttccagaagaaggacttcagcacaattgtttagatattctggccgaggcacatgggacgcgccctgatttgacggatcagccactgcctgatgccgaccatacatggtatactggcggcagtagttatcttcaagaggggcaacgcaaggcgggagcagccgtcactacggagaccgaagttatctgggccaaagcgttacccgcgggaacatccgcgcaacgtgcacagttaatcgctctgacacaggccctgaagatggcagagggcaaaaagttgaatgtctacaccaactcacgttatgcttttgcaacagcgcattggcatggcgaaatttaccgccgccgtggtctgctgactagtgagggtaaggaaattaaaaataaagatgagattcttgcgttgttaaaagctttattcttaccaaaacgcctttcgatcattcattgcccggggcatcaaaagggtcactcagcggaggctcgtggaaaccgtatggcggaccaagctgcccgtaaggcggcgatcacagagaccccggatacatcaacgctgttgatcgaaaacagctctccctacactagcgagcatttttaa

SEQ ID NO: 241 - DNA, 2115 bp, synthetic construct
  source 1..2115: mol_type = other DNA
atgggcagcagccatcatcatcatcatcacagcagcggcctggtgccgcgcggcagccatatgactttaaatattgaggatgagcatcgtttacatgagacatcaaaagaacccgacgtgagcttagggtcaacgtggctttctgacttcccccaggcgtgggcggagactggcggaatggggttagctgtccgccaagcaccgttgatcatcccgttaaaggcaacgtctacacctgtctctatcaaacagtaccccatgagtcgtgaggcccgcctggggattaagccacatattcgtcgcttgtatgaccaggggatcttggtcccatgtcaatctccgtggaacaccccccttcgtcccgtgaaaaagccaggtacaaacgattatcgtccagttcaagatcttcgcgaggtcaacaaacgcgtagaagacatccatccgactgtacctaatccttataatctgttatcaggcctgcccccatcgcaccaatggtatacagtattagacttgaaagacgcgttcttttgcctgcgtctgcacccaacgtctcagccgctgtttgcgttcgaatggcgtgatcctgaaatgggaatttcgggtcagttaacctggactcgtctgccccagggctttaaaaacagccccacattgttcgatgaagcacttcaccgtgacttagcagacttccgtatccaacacccagacttaattctgttacagtatgttgacgaccttttgttggcggcaacgtctgaacttgactgtcagcaaggcacacgcgcgttattacaaacgttaggtaacttaggatatcgtgcgtccgcgaaaaaggcgcaaatttgtcaaaaacaggtaaagtaccttgggtatttgctgaaagaaggtcaacgttggattactgatgcgcgtaaggagaccgtaatggggcagcctacgcctaagacgccacgcgaattgcgtgaatttttgggcaaagcgggattctgtcgtttatggattcctgggttcgctgaaatggctgcacccctgtaccccttaacaaaaacagggacgcttttcaactgggggccagaccagcaaaaggcgtatcaggagatcaaacaagctttgttgaccgcacccgcgttgggtcttccggatttaaccaagccctttgagctgttcgttgatgaaaaacagggatatgcaaaaggagtattaacccaaaagttaggcccgtggcgtcgccctgttgcttacttgagtaaaaaattggatcctgtcgcagcaggatggccaccgtgcttgcgtatggtcgcggcaattgccgttttgacaaaggatgcaggtaagttgacgatgggtcaacccttaaccatccatgctccacatgctgtagaagcgttagtaaagcagcccccagaccgctggctttctaatgcgcgcatgacccactatcaggcgcttctgcttgatacggatcgtgtacaatttggaccagttgtagctttgaatccagctactttgcttccccttccagaagaaggacttcagcacaattgtttagatattctggccgaggcacatgggacgcgccctgatttgacggatcagccactgcctgatgccgaccatacatggtatactggcggcagtagtcttcttcaagaggggcaacgcaaggcgggagcagccgtcactacggagaccgaagttatctgggccaaagcgttacccgcgggaacatccgcgcaacgtgcacagttaatcgctctgacacaggccctgaagatggcagagggcaaaaagttgaatgtctacaccaactcacgttatgcttttgcaacagcgcattggcatggcgaaatttaccgccgccgtggtctgctgactagtgagggtaaggaaattaaaaataaagatgagattcttgcgttgttaaaagctttattcttaccaaaacgcctttcgatcattcattgcccggggcatcaaaagggtcactcagcggaggctcgtggaaaccgtatggcggaccaagctgcccgtaaggcggcgatcacagagaccccggatacatcaacgctgttgatcgaaaacagctctccctacactagcgagcatttttaa

SEQ ID NO: 242 - DNA, 2115 bp, synthetic construct
  source 1..2115: mol_type = other DNA
atgggcagcagccatcatcatcatcatcacagcagcggcctggtgccgcgcggcagccatatgactttaaatattgaggatgagcatcgtttacatgagacatcaaaagaacccgacgtgagcttagggtcaacgtggctttctgacttcccccaggcgtgggcggagactggcggaatggggttagctgtccgccaagcaccgttgatcatcccgttaaaggcaacgtctacacctgtctctatcaaacagtaccccatgagtcgtgaggcccgcctggggattaagccacatattcgtcgcttgtatgaccaggggatcttggtcccatgtcaatctccgtggaacaccccccttcgtcccgtgaaaaagccaggtacaaacgattatcgtccagttcaagatcttcgcgaggtcaacaaacgcgtagaagacatccatccgactgtacctaatccttataatctgttatcaggcctgcccccatcgcaccaatggtatacagtattagacttgaaagacgcgttcttttgcctgcgtctgcacccaacgtctcagccgctgtttgcgttcgaatggcgtgatcctgaaatgggaatttcgggtcagttaacctggactcgtctgccccagggctttaaaaacagccccacattgttcgatgaagcacttcaccgtgacttagcagacttccgtatccaacacccagacttaattctgttacagtatgttgacgaccttttgttggcggcaacgtctgaacttgactgtcagcaaggcacacgcgcgttattacaaacgttaggtaacttaggatatcgtgcgtccgcgaaaaaggcgcaaatttgtcaaaaacaggtaaagtaccttgggtatttgctgaaagaaggtcaacgttggattactgatgcgcgtaaggagaccgtaatggggcagcctacgcctaagacgccacgcgaattgcgtgaatttttgggcaaagcgggattctgtcgtttatggattcctgggttcgctgaaatggctgcacccctgtaccccttaacaaaaacagggacgcttttcaactgggggccagaccagcaaaaggcgtatcaggagatcaaacaagctttgttgaccgcacccgcgttgggtcttccggatttaaccaagccctttgagctgttcgttgatgaaaaacagggatatgcaaaaggagtattaacccaaaagttaggcccgtggcgtcgccctgttgcttacttgagtaaaaaattggatcctgtcgcagcaggatggccaccgtgcttgcgtatggtcgcggcaattgccgttttgacaaaggatgcaggtaagttgacgatgggtcaacccttaacaatcttggctccacatgctgtagaagcgttagtaaagcagcccccagaccgctggctttctaatgcgcgcatgacccactatcaggcgcttctgcttgataacgatcgtgtacaatttggaccagttgtagctttgaatccagctactttgcttccccttccagaagaaggacttcagcacaattgtttagatattctggccgaggcacatgggacgcgccctgatttgacggatcagccactgcctgatgccgaccatacatggtatactggcggcagtagtcttcttcaagaggggcaacgcaaggcgggagcagccgtcactacggagaccgaagttatctgggccaaagcgttacccgcgggaacatccgcgcaacgtgcacagttaatcgctctgacacaggccctgaagatggcagagggcaaaaagttgaatgtctacaccaactcacgttatgcttttgcaacagcgcattggcatggcgaaatttaccgccgccgtggtctgctgactagtgagggtaaggaaattaaaaataaagatgagattcttgcgttgttaaaagctttattcttaccaaaacgcctttcgatcattcattgcccggggcatcaaaagggtcactcagcggaggctcgtggaaaccgtatggcggaccaagctgcccgtaaggcggcgatcacagagaccccggatacatcaacgctgttgatcgaaaacagctctccctacactagcgagcatttttaa

SEQ ID NO: 243 - DNA, 2115 bp, synthetic construct
  source 1..2115: mol_type = other DNA
atgggcagcagccatcatcatcatcatcacagcagcggcctggtgccgcgcggcagccatatgactttaaatattgaggatgagcatcgtttacatgagacatcaaaagaacccgacgtgagcttagggtcaacgtggctttctgacttcccccaggcgtgggcggagactggcggaatggggttagctgtccgccaagcaccgttgatcatcccgttaaaggcaacgtctacacctgtctctatcaaacagtaccccatgagtcgtgaggcccgcctggggattaagccacatattcgtcgcttgtatgaccaggggatcttggtcccatgtcaatctccgtggaacaccccccttcgtcccgtgaaaaagccaggtacaaacgattatcgtccagttcaagatcttcgcgaggtcaacaaacgcgtagaagacatccatccgactgtacctaatccttataatctgttatcaggcctgcccccatcgcaccaatggtatacagtattagacttgaaagacgcgttcttttgcctgcgtctgcacccaacgtctcagccgctgtttgcgttcgaatggcgtgatcctgaaatgggaatttcgggtcagttaacctggactcgtctgccccagggctttaaaaacagccccacattgttcgatgaagcacttcaccgtgacttagcagacttccgtatccaacacccagacttaattctgttacagtatgttgacgaccttttgttggcggcaacgtctgaacttgactgtcagcaaggcacacgcgcgttattacaaacgttaggtaacttaggatatcgtgcgtccgcgaaaaaggcgcaaatttgtcaaaaacaggtaaagtaccttgggtatttgctgaaagaaggtcaacgttggattactgatgcgcgtaaggagaccgtaatggggcagcctacgcctaagacgccacgcgaattgcgtgaatttttgggcaaagcgggattctgtcgtttatggattcctgggttcgctgaaatggctgcacccctgtaccccttaacaaaaacagggacgcttttcaactgggggccagaccagcaaaaggcgtatcaggagatcaaacaagctttgttgaccgcacccgcgttgggtcttccggatttaaccaagccctttgagctgttcgttgatgaaaaacagggatatgcaaaaggagtattaacccaaaagttaggcccgtggcgtcgccctgttgcttacttgagtaaaaaattggatcctgtcgcagcaggatggccaccgtgcttgcgtatggtcgcggcaattgccgttttgacaaaggatgcaggtaagttgacgatgggtcaacccttaacaatcttggctccacatgctgtagaagcgttagtaaagcagcccccagaccgctggctttctaatgcgcgcatgacccactatcaggcgcttctgcttgatacggatcgtgtacaatttggaccagttgtagctttgaatccagctactttgcttccccttccagaagaagcgcttcagcacaattgtttagatattctggccgaggcacatgggacgcgccctgatttgacggatcagccactgcctgatgccgaccatacatggtatactggcggcagtagtcttcttcaagaggggcaacgcaaggcgggagcagccgtcactacggagaccgaagttatctgggccaaagcgttacccgcgggaacatccgcgcaacgtgcacagttaatcgctctgacacaggccctgaagatggcagagggcaaaaagttgaatgtctacaccaactcacgttatgcttttgcaacagcgcattggcatggcgaaatttaccgccgccgtggtctgctgactagtgagggtaaggaaattaaaaataaagatgagattcttgcgttgttaaaagctttattcttaccaaaacgcctttcgatcattcattgcccggggcatcaaaagggtcactcagcggaggctcgtggaaaccgtatggcggaccaagctgcccgtaaggcggcgatcacagagaccccggatacatcaacgctgttgatcgaaaacagctctccctacactagcgagcatttttaa

SEQ ID NO: 244 - DNA, 1569 bp, synthetic construct
  source 1..1569: mol_type = other DNA
atgggcagcagccatcatcatcatcatcacagcagcggcctggtgccgcgcggcagccatatgactttaaatattgaggatgagcatcgtttacatgagacatcaaaagaacccgacgtgagcttagggtcaacgtggctttctgacttcccccaggcgtgggcggagactggcggaatggggttagctgtccgccaagcaccgttgatcatcccgttaaaggcaacgtctacacctgtctctatcaaacagtaccccatgagtcgtgaggcccgcctggggattaagccacatattcgtcgcttgtatgaccaggggatcttggtcccatgtcaatctccgtggaacaccccccttcgtcccgtgaaaaagccaggtacaaacgattatcgtccagttcaagatcttcgcgaggtcaacaaacgcgtagaagacatccatccgactgtacctaatccttataatctgttatcaggcctgcccccatcgcaccaatggtatacagtattagacttgaaagacgcgttcttttgcctgcgtctgcacccaacgtctcagccgctgtttgcgttcgaatggcgtgatcctgaaatgggaatttcgggtcagttaacctggactcgtctgccccagggctttaaaaacagccccacattgttcgatgaagcacttcaccgtgacttagcagacttccgtatccaacacccagacttaattctgttacagtatgttgacgaccttttgttggcggcaacgtctgaacttgactgtcagcaaggcacacgcgcgttattacaaacgttaggtaacttaggatatcgtgcgtccgcgaaaaaggcgcaaatttgtcaaaaacaggtaaagtaccttgggtatttgctgaaagaaggtcaacgttggattactgatgcgcgtaaggagaccgtaatggggcagcctacgcctaagacgccacgcgaattgcgtgaatttttgggcaaagcgggattctgtcgtttatggattcctgggttcgctgaaatggctgcacccctgtaccccttaacaaaaacagggacgcttttcaactgggggccagaccagcaaaaggcgtatcaggagatcaaacaagctttgttgaccgcacccgcgttgggtcttccggatttaaccaagccctttgagctgttcgttgatgaaaaacagggatatgcaaaaggagtattaacccaaaagttaggcccgtggcgtcgccctgttgcttacttgagtaaaaaattggatcctgtcgcagcaggatggccaccgtgcttgcgtatggtcgcggcaattgccgttttgacaaaggatgcaggtaagttgacgatgggtcaacccttaacaatcttggctccacatgctgtagaagcgttagtaaagcagcccccagaccgctggctttctaatgcgcgcatgacccactatcaggcgcttctgcttgatacggatcgtgtacaatttggaccagttgtagctttgaatccagctactttgcttccccttccagaagaaggacttcagcacaattgtttagatattctggccgagtaa

SEQ ID NO: 245 - DNA, 2115 bp, synthetic construct
  source 1..2115: mol_type = other DNA
atgggcagcagccatcatcatcatcatcacagcagcggcctggtgccgcgcggcagccatatgactttaaatattgaggatgagcatcgtttacatgagacatcaaaagaacccgacgtgagcttagggtcaacgtggctttctgacttcccccaggcgtgggcggagactggcggaatggggttagctgtccgccaagcaccgttgatcatcccgttaaaggcaacgtctacacctgtctctatcaaacagtaccccatgagtcgtgaggcccgcctggggattaagccacatattcgtcgcttgtatgaccaggggatcttggtcccatgtcaatctccgtggaacaccccccttcgtcccgtgaaaaagccaggtacaaacgattatcgtccagttcaagatcttcgcgaggtcaacaaacgcgtagaagacatccatccgactgtacctaatccttataatctgttatcaggcctgcccccatcgcaccaatggtatacagtattagacttgaaagacgcgttcttttgcctgcgtctgcacccaacgtctcagccgctgtttgcgttcgaatggcgtgatcctgaaatgggaatttcgggtcagttaacctggactcgtctgccccagggctttaaaaacagccccacattgttcgatgaagcacttcaccgtgacttagcagacttccgtatccaacacccagacttaattctgttacagtatgttgacgaccttttgttggcggcaacgtctgaacttgactgtcagcaaggcacacgcgcgttattacaaacgttaggtaacttaggatatcgtgcgtccgcgaaaaaggcgcaaatttgtcaaaaacaggtaaagtaccttgggtatttgctgaaagaaggtcaacgttggattactgatgcgcgtaaggagaccgtaatggggcagcctacgcctaagacgccacgcgaattgcgtgaatttttgggcaaagcgggattctgtcgtttatggattcctgggttcgctgaaatggctgcacccctgtaccccttaacaaaaacagggacgcttttcaactgggggccagaccagcaaaaggcgtatcaggagatcaaacaagctttgttgaccgcacccgcgttgggtcttccggatttaaccaagccctttgagctgttcgttgatgaaaaacagggatatgcaaaaggagtattaacccaaaagttaggcccgtggcgtcgccctgttgcttacttgagtaaaaaattggatcctgtcgcagcaggatggccaccgtgcttgcgtatggtcgcggcaattgccgttttgacaaaggatgcaggtaagttgacgatgggtcaacccttaacaatcttggctccacatgctgtagaagcgttagtaaagcagcccccagaccgctggctttctaatgcgcgcatgacccactatcaggcgcttctgcttgatacggatcgtgtacaatttggaccagttgtagctttgaatccagctactttgcttccccttccagaagaaggacttcagcacaattgtttagatattctggccgaggcacatgggacgcgccctgatttgacggatcagccactgcctgatgccgaccatacatggtatactggcggcagtagttatcttcaagaggggcaacgcaaggcgggagcagccgtcactacggagaccgaagttatctgggccaaagcgttacccgcgggaacatccgcgcaacgtgcacagttaatcgctctgacacaggccctgaagatggcagagggcaaaaagttgaatgtctacaccaactcacgttatgcttttgcaacagcgcattggcatggcgaaatttaccgccgccgtggtctgctgactagtgagggtaaggaaattaaaaataaagatgagattcttgcgttgttaaaagctttattcttaccaaaacgcctttcgatcattcattgcccggggcatcaaaagggtcactcagcggaggctcgtggaaaccgtatggcggaccaagctgcccgtaaggcggcgatcacagagaccccggatacatcaacgctgttgatcgaaaacagctctccctacactagcgagcatttttaa

SEQ ID NO: 246 - DNA, 2115 bp, synthetic construct
  source 1..2115: mol_type = other DNA
atgggcagcagccatcatcatcatcatcacagcagcggcctggtgccgcgcggcagccatatgactttaaatattgaggatgagcatcgtttacatgagacatcaaaagaacccgacgtgagcttagggtcaacgtggctttctgacttcccccaggcgtgggcggagactggcggaatggggttagctgtccgccaagcaccgttgatcatcccgttaaaggcaacgtctacacctgtctctatcaaacagtaccccatgagtcgtgaggcccgcctggggattaagccacatattcgtcgcttgtatgaccaggggatcttggtcccatgtcaatctccgtggaacaccccccttcgtcccgtgaaaaagccaggtacaaacgattatcgtccagttcaagatcttcgcgaggtcaacaaacgcgtagaagacatccatccgactgtacctaatccttataatctgttatcaggcctgcccccatcgcaccaatggtatacagtattagacttgaaagacgcgttcttttgcctgcgtctgcacccaacgtctcagccgctgtttgcgttcgaatggcgtgatcctgaaatgggaatttcgggtcagttaacctggactcgtctgccccagggctttaaaaacagccccacattgttcgatgaagcacttcaccgtgacttagcagacttccgtatccaacacccagacttaattctgttacagtatgttgacgaccttttgttggcggcaacgtctgaacttgactgtcagcaaggcacacgcgcgttattacaaacgttaggtaacttaggatatcgtgcgtccgcgaaaaaggcgcaaatttgtcaaaaacaggtaaagtaccttgggtatttgctgaaagaaggtcaacgttggattactgatgcgcgtaaggagaccgtaatggggcagcctacgcctaagacgccacgcgaattgcgtgaatttttgggcaaagcgggattctgtcgtttatggattcctgggttcgctgaaatggctgcacccctgtaccccttaacaaaaacagggacgcttttcaactgggggccagaccagcaaaaggcgtatcaggagatcaaacaagctttgttgaccgcacccgcgttgggtcttccggatttaaccaagccctttgagctgttcgttgatgaaaaacagggatatgcaaaaggagtattaacccaaaagttaggcccgtggcgtcgccctgttgcttacttgagtaaaaaattggatcctgtcgcagcaggatggccaccgtgcttgcgtatggtcgcggcaattgccgttttgacaaaggatgcaggtaagttgacgatgggtcaacccttaacaatcttggctccacatgctgtagaagcgttagtaaagcagcccccagaccgctggctttctaatgcgcgcatgacccactatcaggcgcttctgcttgatacggatcgtgtacaatttggaccagttgtagctttgaatccagctactttgcttccccttccagaagaaggacttcagcacaattgtttagatattctggccgaggcacatgggacgcgccctgatttgacggatcagccactgcctgatgccgaccatacatggtatactggcggcagtagtcttcttcaagaggggcaacgcaaggcgggagcagccgtcactacggagaccgaagttatctgggccaaagcgttacccgcgggaacatccgcgcaacgtgcacagttaatcgctctgacacaggccctgaagatggcagagggcaaaaagttgaatgtctacaccaactcacgttatgcttttgcaacagcgcattggcatggcgaaatttaccgccgccgtggtctgctgactagtgagggtaaggaaattaaaaataaagatgagattcttgcgttgttaaaagctttattcttaccaaaaatgctttcgatcattcattgcccggggcatcaaaagggtcactcagcggaggctcgtggaaaccgtatggcggaccaagctgcccgtaaggcggcgatcacagagaccccggatacatcaacgctgttgatcgaaaacagctctccctacactagcgagcatttttaa

SEQ ID NO: 247 - DNA, 2115 bp, synthetic construct
  source 1..2115: mol_type = other DNA
atgggcagcagccatcatcatcatcatcacagcagcggcctggtgccgcgcggcagccatatgactttaaatattgaggatgagcatcgtttacatgagacatcaaaagaacccgacgtgagcttagggtcaacgtggctttctgacttcccccaggcgtgggcggagactggcggaatggggttagctgtccgccaagcaccgttgatcatcccgttaaaggcaacgtctacacctgtctctatcaaacagtaccccatgagtcgtgaggcccgcctggggattaagccacatattcgtcgcttgtatgaccaggggatcttggtcccatgtcaatctccgtggaacaccccccttcgtcccgtgaaaaagccaggtacaaacgattatcgtccagttcaagatcttcgcgaggtcaacaaacgcgtagaagacatccatccgactgtacctaatccttataatctgttatcaggcctgcccccatcgcaccaatggtatacagtattagacttgaaagacgcgttcttttgcctgcgtctgcacccaacgtctcagccgctgtttgcgttcgaatggcgtgatcctgaaatgggaatttcgggtcagttaacctggactcgtctgccccagggctttaaaaacagccccacattgttcgatgaagcacttcaccgtgacttagcagacttccgtatccaacacccagacttaattctgttacagtatgttgacgaccttttgttggcggcaacgtctgaacttgactgtcagcaaggcacacgcgcgttattacaaacgttaggtaacttaggatatcgtgcgtccgcgaaaaaggcgcaaatttgtcaaaaacaggtaaagtaccttgggtatttgctgaaagaaggtcaacgttggattactgatgcgcgtaaggagaccgtaatggggcagcctacgcctaagacgccacgcgaattgcgtgaatttttgggcaaagcgggattctgtcgtttatggattcctgggttcgctgaaatggctgcacccctgtaccccttaacaaaaacagggacgcttttcaactgggggccagaccagcaaaaggcgtatcaggagatcaaacaagctttgttgaccgcacccgcgttgggtcttccggatttaaccaagccctttgagctgttcgttgatgaaaaacagggatatgcaaaaggagtattaacccaaaagttaggcccgtggcgtcgccctgttgcttacttgagtaaaaaattggatcctgtcgcagcaggatggccaccgtgcttgcgtatggtcgcggcaattgccgttttgacaaaggatgcaggtaagttgacgatgggtcaacccttaacaatcttggctccacatgctgtagaagcgttagtaaagcagcccccagaccgctggctttctaatgcgcgcatgacccactatcaggcgcttctgcttgatacggatcgtgtacaatttggaccagttgtagctttgaatccagctactttgcttccccttccagaagaaggacttcagcacaattgtttagatattctggccgaggcacatgggacgcgccctgatttgacggatcagccactgcctgatgccgaccatacatggtatactggcggcagtagtcttcttcaagaggggcaacgcaaggcgggagcagccgtcactacggagaccgaagttatctgggccaaagcgttacccgcgggaacatccgcgcaacgtgcacagttaatcgctctgacacaggccctgaagatggcagagggcaaaaagttgaatgtctacaccaactcacgttatgcttttgcaacagcgcattggcatggcgaaatttaccgccgccgtggtctgctgactagtgagggtaaggaaattaaaaataaagatgagattcttgcgttgttaaaagctttattcttaccaaaacgcctttcgatcattcattgcccggggcatcaaaagggtcactcagcggaggtacgtggaaaccgtatggcggaccaagctgcccgtaaggcggcgatcacagagaccccggatacatcaacgctgttgatcgaaaacagctctccctacactagcgagcatttttaa

SEQ ID NO: 248 - DNA, 2115 bp, synthetic construct
  source 1..2115: mol_type = other DNA
atgggcagcagccatcatcatcatcatcacagcagcggcctggtgccgcgcggcagccatatgactttaaatattgaggatgagcatcgtttacatgagacatcaaaagaacccgacgtgagcttagggtcaacgtggctttctgacttcccccaggcgtgggcggagactggcggaatggggttagctgtccgccaagcaccgttgatcatcccgttaaaggcaacgtctacacctgtctctatcaaacagtaccccatgagtcgtgaggcccgcctggggattaagccacatattcgtcgcttgtatgaccaggggatcttggtcccatgtcaatctccgtggaacaccccccttcgtcccgtgaaaaagccaggtacaaacgattatcgtccagttcaagatcttcgcgaggtcaacaaacgcgtagaagacatccatccgactgtacctaatccttataatctgttatcaggcctgcccccatcgcaccaatggtatacagtattagacttgaaagacgcgttcttttgcctgcgtctgcacccaacgtctcagccgctgtttgcgttcgaatggcgtgatcctgaaatgggaatttcgggtcagttaacctggactcgtctgccccagggctttaaaaacagccccacattgttcgatgaagcacttcaccgtgacttagcagacttccgtatccaacacccagacttaattctgttacagtatgttgacgaccttttgttggcggcaacgtctgaacttgactgtcagcaaggcacacgcgcgttattacaaacgttaggtaacttaggatatcgtgcgtccgcgaaaaaggcgcaaatttgtcaaaaacaggtaaagtaccttgggtatttgctgaaagaaggtcaacgttggattactgatgcgcgtaaggagaccgtaatggggcagcctacgcctaagacgccacgcgaattgcgtgaatttttgggcaaagcgggattctgtcgtttatggattcctgggttcgctgaaatggctgcacccctgtaccccttaacaaaaacagggacgcttttcaactgggggccagaccagcaaaaggcgtatcaggagatcaaacaagctttgttgaccgcacccgcgttgggtcttccggatttaaccaagccctttgagctgttcgttgatgaaaaacagggatatgcaaaaggagtattaacccaaaagttaggcccgtggcgtcgccctgttgcttacttgagtaaaaaattggatcctgtcgcagcaggatggccaccgtgcttgcgtatggtcgcggcaattgccgttttgacaaaggatgcaggtaagttgacgatgggtcaacccttaaacatccatgctccacatgctgtagaagcgttagtaaagcagcccccagaccgctggctttctaatgcgcgcatgacccactatcaggcgcttctgcttgataacgatcgtgtacaatttggaccagttgtagctttgaatccagctactttgcttccccttccagaagaaggacttcagcacaattgtttagatattctggccgaggcacatgggacgcgccctgatttgacggatcagccactgcctgatgccgaccatacatggtatactggcggcagtagtcttcttcaagaggggcaacgcaaggcgggagcagccgtcactacggagaccgaagttatctgggccaaagcgttacccgcgggaacatccgcgcaacgtgcacagttaatcgctctgacacaggccctgaagatggcagagggcaaaaagttgaatgtctacaccaactcacgttatgcttttgcaacagcgcattggcatggcgaaatttaccgccgccgtggtctgctgactagtgagggtaaggaaattaaaaataaagatgagattcttgcgttgttaaaagctttattcttaccaaaacgcctttcgatcattcattgcccggggcatcaaaagggtcactcagcggaggctcgtggaaaccgtatggcggaccaagctgcccgtaaggcggcgatcacagagaccccggatacatcaacgctgttgatcgaaaacagctctccctacactagcgagcatttttaa

SEQ ID NO: 249 - DNA, 1569 bp, synthetic construct
  source 1..1569: mol_type = other DNA
atgggcagcagccatcatcatcatcatcacagcagcggcctggtgccgcgcggcagccatatgactttaaatattgaggatgagcatcgtttacatgagacatcaaaagaacccgacgtgagcttagggtcaacgtggctttctgacttcccccaggcgtgggcggagactggcggaatggggttagctgtccgccaagcaccgttgatcatcccgttaaaggcaacgtctacacctgtctctatcaaacagtaccccatgagtcgtgaggcccgcctggggattaagccacatattcgtcgcttgtatgaccaggggatcttggtcccatgtcaatctccgtggaacaccccccttcgtcccgtgaaaaagccaggtacaaacgattatcgtccagttcaagatcttcgcgaggtcaacaaacgcgtagaagacatccatccgactgtacctaatccttataatctgttatcaggcctgcccccatcgcaccaatggtatacagtattagacttgaaagacgcgttcttttgcctgcgtctgcacccaacgtctcagccgctgtttgcgttcgaatggcgtgatcctgaaatgggaatttcgggtcagttaacctggactcgtctgccccagggctttaaaaacagccccacattgttcgatgaagcacttcaccgtgacttagcagacttccgtatccaacacccagacttaattctgttacagtatgttgacgaccttttgttggcggcaacgtctgaacttgactgtcagcaaggcacacgcgcgttattacaaacgttaggtaacttaggatatcgtgcgtccgcgaaaaaggcgcaaatttgtcaaaaacaggtaaagtaccttgggtatttgctgaaagaaggtcaacgttggattactgatgcgcgtaaggagaccgtaatggggcagcctacgcctaagacgccacgcgaattgcgtgaatttttgggcaaagcgggattctgtcgtttatggattcctgggttcgctgaaatggctgcacccctgtaccccttaacaaaaacagggacgcttttcaactgggggccagaccagcaaaaggcgtatcaggagatcaaacaagctttgttgaccgcacccgcgttgggtcttccggatttaaccaagccctttgagctgttcgttgatgaaaaacagggatatgcaaaaggagtattaacccaaaagttaggcccgtggcgtcgccctgttgcttacttgagtaaaaaattggatcctgtcgcagcaggatggccaccgtgcttgcgtatggtcgcggcaattgccgttttgacaaaggatgcaggtaagttgacgatgggtcaacccttaaacatccatgctccacatgctgtagaagcgttagtaaagcagcccccagaccgctggctttctaatgcgcgcatgacccactatcaggcgcttctgcttgatacggatcgtgtacaatttggaccagttgtagctttgaatccagctactttgcttccccttccagaagaaggacttcagcacaattgtttagatattctggccgagtaa

SEQ ID NO: 250 - DNA, 2115 bp, synthetic construct
  source 1..2115: mol_type = other DNA
atgggcagcagccatcatcatcatcatcacagcagcggcctggtgccgcgcggcagccatatgactttaaatattgaggatgagcatcgtttacatgagacatcaaaagaacccgacgtgagcttagggtcaacgtggctttctgacttcccccaggcgtgggcggagactggcggaatggggttagctgtccgccaagcaccgttgatcatcccgttaaaggcaacgtctacacctgtctctatcaaacagtaccccatgagtcgtgaggcccgcctggggattaagccacatattcgtcgcttgtatgaccaggggatcttggtcccatgtcaatctccgtggaacaccccccttcgtcccgtgaaaaagccaggtacaaacgattatcgtccagttcaagatcttcgcgaggtcaacaaacgcgtagaagacatccatccgactgtacctaatccttataatctgttatcaggcctgcccccatcgcaccaatggtatacagtattagacttgaaagacgcgttcttttgcctgcgtctgcacccaacgtctcagccgctgtttgcgttcgaatggcgtgatcctgaaatgggaatttcgggtcagttaacctggactcgtctgccccagggctttaaaaacagccccacattgttcgatgaagcacttcaccgtgacttagcagacttccgtatccaacacccagacttaattctgttacagtatgttgacgaccttttgttggcggcaacgtctgaacttgactgtcagcaaggcacacgcgcgttattacaaacgttaggtaacttaggatatcgtgcgtccgcgaaaaaggcgcaaatttgtcaaaaacaggtaaagtaccttgggtatttgctgaaagaaggtcaacgttggattactgatgcgcgtaaggagaccgtaatggggcagcctacgcctaagacgccacgcgaattgcgtgaatttttgggcaaagcgggattctgtcgtttatggattcctgggttcgctgaaatggctgcacccctgtaccccttaacaaaaacagggacgcttttcaactgggggccagaccagcaaaaggcgtatcaggagatcaaacaagctttgttgaccgcacccgcgttgggtcttccggatttaaccaagccctttgagctgttcgttgatgaaaaacagggatatgcaaaaggagtattaacccaaaagttaggcccgtggcgtcgccctgttgcttacttgagtaaaaaattggatcctgtcgcagcaggatggccaccgtgcttgcgtatggtcgcggcaattgccgttttgacaaaggatgcaggtaagttgacgatgggtcaacccttaaacatccatgctccacatgctgtagaagcgttagtaaagcagcccccagaccgctggctttctaatgcgcgcatgacccactatcaggcgcttctgcttgatacggatcgtgtacaatttggaccagttgtagctttgaatccagctactttgcttccccttccagaagaaggacttcagcacaattgtttagatattctggccgaggcacatgggacgcgccctgatttgacggatcagccactgcctgatgccgaccatacatggtatactggcggcagtagttatcttcaagaggggcaacgcaaggcgggagcagccgtcactacggagaccgaagttatctgggccaaagcgttacccgcgggaacatccgcgcaacgtgcacagttaatcgctctgacacaggccctgaagatggcagagggcaaaaagttgaatgtctacaccaactcacgttatgcttttgcaacagcgcattggcatggcgaaatttaccgccgccgtggtctgctgactagtgagggtaaggaaattaaaaataaagatgagattcttgcgttgttaaaagctttattcttaccaaaacgcctttcgatcattcattgcccggggcatcaaaagggtcactcagcggaggctcgtggaaaccgtatggcggaccaagctgcccgtaaggcggcgatcacagagaccccggatacatcaacgctgttgatcgaaaacagctctccctacactagcgagcatttttaa

SEQ ID NO: 251 - DNA, 2115 bp, synthetic construct
  source 1..2115: mol_type = other DNA
atgggcagcagccatcatcatcatcatcacagcagcggcctggtgccgcgcggcagccatatgactttaaatattgaggatgagcatcgtttacatgagacatcaaaagaacccgacgtgagcttagggtcaacgtggctttctgacttcccccaggcgtgggcggagactggcggaatggggttagctgtccgccaagcaccgttgatcatcccgttaaaggcaacgtctacacctgtctctatcaaacagtaccccatgagtcgtgaggcccgcctggggattaagccacatattcgtcgcttgtatgaccaggggatcttggtcccatgtcaatctccgtggaacaccccccttcgtcccgtgaaaaagccaggtacaaacgattatcgtccagttcaagatcttcgcgaggtcaacaaacgcgtagaagacatccatccgactgtacctaatccttataatctgttatcaggcctgcccccatcgcaccaatggtatacagtattagacttgaaagacgcgttcttttgcctgcgtctgcacccaacgtctcagccgctgtttgcgttcgaatggcgtgatcctgaaatgggaatttcgggtcagttaacctggactcgtctgccccagggctttaaaaacagccccacattgttcgatgaagcacttcaccgtgacttagcagacttccgtatccaacacccagacttaattctgttacagtatgttgacgaccttttgttggcggcaacgtctgaacttgactgtcagcaaggcacacgcgcgttattacaaacgttaggtaacttaggatatcgtgcgtccgcgaaaaaggcgcaaatttgtcaaaaacaggtaaagtaccttgggtatttgctgaaagaaggtcaacgttggattactgatgcgcgtaaggagaccgtaatggggcagcctacgcctaagacgccacgcgaattgcgtgaatttttgggcaaagcgggattctgtcgtttatggattcctgggttcgctgaaatggctgcacccctgtaccccttaacaaaaacagggacgcttttcaactgggggccagaccagcaaaaggcgtatcaggagatcaaacaagctttgttgaccgcacccgcgttgggtcttccggatttaaccaagccctttgagctgttcgttgatgaaaaacagggatatgcaaaaggagtattaacccaaaagttaggcccgtggcgtcgccctgttgcttacttgagtaaaaaattggatcctgtcgcagcaggatggccaccgtgcttgcgtatggtcgcggcaattgccgttttgacaaaggatgcaggtaagttgacgatgggtcaacccttaaacatcttggctccacatgctgtagaagcgttagtaaagcagcccccagaccgctggctttctaatgcgcgcatgacccactatcaggcgcttctgcttgataacgatcgtgtacaatttggaccagttgtagctttgaatccagctactttgcttccccttccagaagaagcgcttcagcacaattgtttagatattctggccgaggcacatgggacgcgccctgatttgacggatcagccactgcctgatgccgaccatacatggtatactggcggcagtagtcttcttcaagaggggcaacgcaaggcgggagcagccgtcactacggagaccgaagttatctgggccaaagcgttacccgcgggaacatccgcgcaacgtgcacagttaatcgctctgacacaggccctgaagatggcagagggcaaaaagttgaatgtctacaccaactcacgttatgcttttgcaacagcgcattggcatggcgaaatttaccgccgccgtggtctgctgactagtgagggtaaggaaattaaaaataaagatgagattcttgcgttgttaaaagctttattcttaccaaaacgcctttcgatcattcattgcccggggcatcaaaagggtcactcagcggaggctcgtggaaaccgtatggcggaccaagctgcccgtaaggcggcgatcacagagaccccggatacatcaacgctgttgatcgaaaacagctctccctacactagcgagcatttttaa

SEQ ID NO: 252 - DNA, 1569 bp, synthetic construct
  source 1..1569: mol_type = other DNA
atgggcagcagccatcatcatcatcatcacagcagcggcctggtgccgcgcggcagccatatgactttaaatattgaggatgagcatcgtttacatgagacatcaaaagaacccgacgtgagcttagggtcaacgtggctttctgacttcccccaggcgtgggcggagactggcggaatggggttagctgtccgccaagcaccgttgatcatcccgttaaaggcaacgtctacacctgtctctatcaaacagtaccccatgagtcgtgaggcccgcctggggattaagccacatattcgtcgcttgtatgaccaggggatcttggtcccatgtcaatctccgtggaacaccccccttcgtcccgtgaaaaagccaggtacaaacgattatcgtccagttcaagatcttcgcgaggtcaacaaacgcgtagaagacatccatccgactgtacctaatccttataatctgttatcaggcctgcccccatcgcaccaatggtatacagtattagacttgaaagacgcgttcttttgcctgcgtctgcacccaacgtctcagccgctgtttgcgttcgaatggcgtgatcctgaaatgggaatttcgggtcagttaacctggactcgtctgccccagggctttaaaaacagccccacattgttcgatgaagcacttcaccgtgacttagcagacttccgtatccaacacccagacttaattctgttacagtatgttgacgaccttttgttggcggcaacgtctgaacttgactgtcagcaaggcacacgcgcgttattacaaacgttaggtaacttaggatatcgtgcgtccgcgaaaaaggcgcaaatttgtcaaaaacaggtaaagtaccttgggtatttgctgaaagaaggtcaacgttggattactgatgcgcgtaaggagaccgtaatggggcagcctacgcctaagacgccacgcgaattgcgtgaatttttgggcaaagcgggattctgtcgtttatggattcctgggttcgctgaaatggctgcacccctgtaccccttaacaaaaacagggacgcttttcaactgggggccagaccagcaaaaggcgtatcaggagatcaaacaagctttgttgaccgcacccgcgttgggtcttccggatttaaccaagccctttgagctgttcgttgatgaaaaacagggatatgcaaaaggagtattaacccaaaagttaggcccgtggcgtcgccctgttgcttacttgagtaaaaaattggatcctgtcgcagcaggatggccaccgtgcttgcgtatggtcgcggcaattgccgttttgacaaaggatgcaggtaagttgacgatgggtcaacccttaaacatcttggctccacatgctgtagaagcgttagtaaagcagcccccagaccgctggctttctaatgcgcgcatgacccactatcaggcgcttctgcttgataacgatcgtgtacaatttggaccagttgtagctttgaatccagctactttgcttccccttccagaagaaggacttcagcacaattgtttagatattctggccgagtaa

SEQ ID NO: 253 - DNA, 2115 bp, synthetic construct
  source 1..2115: mol_type = other DNA
atgggcagcagccatcatcatcatcatcacagcagcggcctggtgccgcgcggcagccatatgactttaaatattgaggatgagcatcgtttacatgagacatcaaaagaacccgacgtgagcttagggtcaacgtggctttctgacttcccccaggcgtgggcggagactggcggaatggggttagctgtccgccaagcaccgttgatcatcccgttaaaggcaacgtctacacctgtctctatcaaacagtaccccatgagtcgtgaggcccgcctggggattaagccacatattcgtcgcttgtatgaccaggggatcttggtcccatgtcaatctccgtggaacaccccccttcgtcccgtgaaaaagccaggtacaaacgattatcgtccagttcaagatcttcgcgaggtcaacaaacgcgtagaagacatccatccgactgtacctaatccttataatctgttatcaggcctgcccccatcgcaccaatggtatacagtattagacttgaaagacgcgttcttttgcctgcgtctgcacccaacgtctcagccgctgtttgcgttcgaatggcgtgatcctgaaatgggaatttcgggtcagttaacctggactcgtctgccccagggctttaaaaacagccccacattgttcgatgaagcacttcaccgtgacttagcagacttccgtatccaacacccagacttaattctgttacagtatgttgacgaccttttgttggcggcaacgtctgaacttgactgtcagcaaggcacacgcgcgttattacaaacgttaggtaacttaggatatcgtgcgtccgcgaaaaaggcgcaaatttgtcaaaaacaggtaaagtaccttgggtatttgctgaaagaaggtcaacgttggattactgatgcgcgtaaggagaccgtaatggggcagcctacgcctaagacgccacgcgaattgcgtgaatttttgggcaaagcgggattctgtcgtttatggattcctgggttcgctgaaatggctgcacccctgtaccccttaacaaaaacagggacgcttttcaactgggggccagaccagcaaaaggcgtatcaggagatcaaacaagctttgttgaccgcacccgcgttgggtcttccggatttaaccaagccctttgagctgttcgttgatgaaaaacagggatatgcaaaaggagtattaacccaaaagttaggcccgtggcgtcgccctgttgcttacttgagtaaaaaattggatcctgtcgcagcaggatggccaccgtgcttgcgtatggtcgcggcaattgccgttttgacaaaggatgcaggtaagttgacgatgggtcaacccttaaacatcttggctccacatgctgtagaagcgttagtaaagcagcccccagaccgctggctttctaatgcgcgcatgacccactatcaggcgcttctgcttgataacgatcgtgtacaatttggaccagttgtagctttgaatccagctactttgcttccccttccagaagaaggacttcagcacaattgtttagatattctggccgaggcacatgggacgcgccctgatttgacggatcagccactgcctgatgccgaccatacatggtatactggcggcagtagttatcttcaagaggggcaacgcaaggcgggagcagccgtcactacggagaccgaagttatctgggccaaagcgttacccgcgggaacatccgcgcaacgtgcacagttaatcgctctgacacaggccctgaagatggcagagggcaaaaagttgaatgtctacaccaactcacgttatgcttttgcaacagcgcattggcatggcgaaatttaccgccgccgtggtctgctgactagtgagggtaaggaaattaaaaataaagatgagattcttgcgttgttaaaagctttattcttaccaaaacgcctttcgatcattcattgcccggggcatcaaaagggtcactcagcggaggctcgtggaaaccgtatggcggaccaagctgcccgtaaggcggcgatcacagagaccccggatacatcaacgctgttgatcgaaaacagctctccctacactagcgagcatttttaa

SEQ ID NO: 254 - DNA, 2115 bp, synthetic construct
  source 1..2115: mol_type = other DNA
atgggcagcagccatcatcatcatcatcacagcagcggcctggtgccgcgcggcagccatatgactttaaatattgaggatgagcatcgtttacatgagacatcaaaagaacccgacgtgagcttagggtcaacgtggctttctgacttcccccaggcgtgggcggagactggcggaatggggttagctgtccgccaagcaccgttgatcatcccgttaaaggcaacgtctacacctgtctctatcaaacagtaccccatgagtcgtgaggcccgcctggggattaagccacatattcgtcgcttgtatgaccaggggatcttggtcccatgtcaatctccgtggaacaccccccttcgtcccgtgaaaaagccaggtacaaacgattatcgtccagttcaagatcttcgcgaggtcaacaaacgcgtagaagacatccatccgactgtacctaatccttataatctgttatcaggcctgcccccatcgcaccaatggtatacagtattagacttgaaagacgcgttcttttgcctgcgtctgcacccaacgtctcagccgctgtttgcgttcgaatggcgtgatcctgaaatgggaatttcgggtcagttaacctggactcgtctgccccagggctttaaaaacagccccacattgttcgatgaagcacttcaccgtgacttagcagacttccgtatccaacacccagacttaattctgttacagtatgttgacgaccttttgttggcggcaacgtctgaacttgactgtcagcaaggcacacgcgcgttattacaaacgttaggtaacttaggatatcgtgcgtccgcgaaaaaggcgcaaatttgtcaaaaacaggtaaagtaccttgggtatttgctgaaagaaggtcaacgttggattactgatgcgcgtaaggagaccgtaatggggcagcctacgcctaagacgccacgcgaattgcgtgaatttttgggcaaagcgggattctgtcgtttatggattcctgggttcgctgaaatggctgcacccctgtaccccttaacaaaaacagggacgcttttcaactgggggccagaccagcaaaaggcgtatcaggagatcaaacaagctttgttgaccgcacccgcgttgggtcttccggatttaaccaagccctttgagctgttcgttgatgaaaaacagggatatgcaaaaggagtattaacccaaaagttaggcccgtggcgtcgccctgttgcttacttgagtaaaaaattggatcctgtcgcagcaggatggccaccgtgcttgcgtatggtcgcggcaattgccgttttgacaaaggatgcaggtaagttgacgatgggtcaacccttaaacatcttggctccacatgctgtagaagcgttagtaaagcagcccccagaccgctggctttctaatgcgcgcatgacccactatcaggcgcttctgcttgataacgatcgtgtacaatttggaccagttgtagctttgaatccagctactttgcttccccttccagaagaaggacttcagcacaattgtttagatattctggccgaggcacatgggacgcgccctgatttgacggatcagccactgcctgatgccgaccatacatggtatactggcggcagtagtcttcttcaagaggggcaacgcaaggcgggagcagccgtcactacggagaccgaagttatctgggccaaagcgttacccgcgggaacatccgcgcaacgtgcacagttaatcgctctgacacaggccctgaagatggcagagggcaaaaagttgaatgtctacaccaactcacgttatgcttttgcaacagcgcattggcatggcgaaatttaccgccgccgtggtctgctgactagtgagggtaaggaaattaaaaataaagatgagattcttgcgttgttaaaagctttattcttaccaaaaatgctttcgatcattcattgcccggggcatcaaaagggtcactcagcggaggctcgtggaaaccgtatggcggaccaagctgcccgtaaggcggcgatcacagagaccccggatacatcaacgctgttgatcgaaaacagctctccctacactagcgagcatttttaa

SEQ ID NO: 255 - DNA, 2115 bp, synthetic construct
  source 1..2115: mol_type = other DNA
atgggcagcagccatcatcatcatcatcacagcagcggcctggtgccgcgcggcagccatatgactttaaatattgaggatgagcatcgtttacatgagacatcaaaagaacccgacgtgagcttagggtcaacgtggctttctgacttcccccaggcgtgggcggagactggcggaatggggttagctgtccgccaagcaccgttgatcatcccgttaaaggcaacgtctacacctgtctctatcaaacagtaccccatgagtcgtgaggcccgcctggggattaagccacatattcgtcgcttgtatgaccaggggatcttggtcccatgtcaatctccgtggaacaccccccttcgtcccgtgaaaaagccaggtacaaacgattatcgtccagttcaagatcttcgcgaggtcaacaaacgcgtagaagacatccatccgactgtacctaatccttataatctgttatcaggcctgcccccatcgcaccaatggtatacagtattagacttgaaagacgcgttcttttgcctgcgtctgcacccaacgtctcagccgctgtttgcgttcgaatggcgtgatcctgaaatgggaatttcgggtcagttaacctggactcgtctgccccagggctttaaaaacagccccacattgttcgatgaagcacttcaccgtgacttagcagacttccgtatccaacacccagacttaattctgttacagtatgttgacgaccttttgttggcggcaacgtctgaacttgactgtcagcaaggcacacgcgcgttattacaaacgttaggtaacttaggatatcgtgcgtccgcgaaaaaggcgcaaatttgtcaaaaacaggtaaagtaccttgggtatttgctgaaagaaggtcaacgttggattactgatgcgcgtaaggagaccgtaatggggcagcctacgcctaagacgccacgcgaattgcgtgaatttttgggcaaagcgggattctgtcgtttatggattcctgggttcgctgaaatggctgcacccctgtaccccttaacaaaaacagggacgcttttcaactgggggccagaccagcaaaaggcgtatcaggagatcaaacaagctttgttgaccgcacccgcgttgggtcttccggatttaaccaagccctttgagctgttcgttgatgaaaaacagggatatgcaaaaggagtattaacccaaaagttaggcccgtggcgtcgccctgttgcttacttgagtaaaaaattggatcctgtcgcagcaggatggccaccgtgcttgcgtatggtcgcggcaattgccgttttgacaaaggatgcaggtaagttgacgatgggtcaacccttaaacatcttggctccacatgctgtagaagcgttagtaaagcagcccccagaccgctggctttctaatgcgcgcatgacccactatcaggcgcttctgcttgataacgatcgtgtacaatttggaccagttgtagctttgaatccagctactttgcttccccttccagaagaaggacttcagcacaattgtttagatattctggccgaggcacatgggacgcgccctgatttgacggatcagccactgcctgatgccgaccatacatggtatactggcggcagtagtcttcttcaagaggggcaacgcaaggcgggagcagccgtcactacggagaccgaagttatctgggccaaagcgttacccgcgggaacatccgcgcaacgtgcacagttaatcgctctgacacaggccctgaagatggcagagggcaaaaagttgaatgtctacaccaactcacgttatgcttttgcaacagcgcattggcatggcgaaatttaccgccgccgtggtctgctgactagtgagggtaaggaaattaaaaataaagatgagattcttgcgttgttaaaagctttattcttaccaaaacgcctttcgatcattcattgcccggggcatcaaaagggtcactcagcggaggtacgtggaaaccgtatggcggaccaagctgcccgtaaggcggcgatcacagagaccccggatacatcaacgctgttgatcgaaaacagctctccctacactagcgagcatttttaa

SEQ ID NO: 256 - DNA, 1569 bp, synthetic construct
  source 1..1569: mol_type = other DNA
atgggcagcagccatcatcatcatcatcacagcagcggcctggtgccgcgcggcagccatatgactttaaatattgaggatgagcatcgtttacatgagacatcaaaagaacccgacgtgagcttagggtcaacgtggctttctgacttcccccaggcgtgggcggagactggcggaatggggttagctgtccgccaagcaccgttgatcatcccgttaaaggcaacgtctacacctgtctctatcaaacagtaccccatgagtcgtgaggcccgcctggggattaagccacatattcgtcgcttgtatgaccaggggatcttggtcccatgtcaatctccgtggaacaccccccttcgtcccgtgaaaaagccaggtacaaacgattatcgtccagttcaagatcttcgcgaggtcaacaaacgcgtagaagacatccatccgactgtacctaatccttataatctgttatcaggcctgcccccatcgcaccaatggtatacagtattagacttgaaagacgcgttcttttgcctgcgtctgcacccaacgtctcagccgctgtttgcgttcgaatggcgtgatcctgaaatgggaatttcgggtcagttaacctggactcgtctgccccagggctttaaaaacagccccacattgttcgatgaagcacttcaccgtgacttagcagacttccgtatccaacacccagacttaattctgttacagtatgttgacgaccttttgttggcggcaacgtctgaacttgactgtcagcaaggcacacgcgcgttattacaaacgttaggtaacttaggatatcgtgcgtccgcgaaaaaggcgcaaatttgtcaaaaacaggtaaagtaccttgggtatttgctgaaagaaggtcaacgttggattactgatgcgcgtaaggagaccgtaatggggcagcctacgcctaagacgccacgcgaattgcgtgaatttttgggcaaagcgggattctgtcgtttatggattcctgggttcgctgaaatggctgcacccctgtaccccttaacaaaaacagggacgcttttcaactgggggccagaccagcaaaaggcgtatcaggagatcaaacaagctttgttgaccgcacccgcgttgggtcttccggatttaaccaagccctttgagctgttcgttgatgaaaaacagggatatgcaaaaggagtattaacccaaaagttaggcccgtggcgtcgccctgttgcttacttgagtaaaaaattggatcctgtcgcagcaggatggccaccgtgcttgcgtatggtcgcggcaattgccgttttgacaaaggatgcaggtaagttgacgatgggtcaacccttaaacatcttggctccacatgctgtagaagcgttagtaaagcagcccccagaccgctggctttctaatgcgcgcatgacccactatcaggcgcttctgcttgatacggatcgtgtacaatttggaccagttgtagctttgaatccagctactttgcttccccttccagaagaagcgcttcagcacaattgtttagatattctggccgagtaa

SEQ ID NO: 257 - DNA, 2115 bp, synthetic construct
  source 1..2115: mol_type = other DNA
atgggcagcagccatcatcatcatcatcacagcagcggcctggtgccgcgcggcagccatatgactttaaatattgaggatgagcatcgtttacatgagacatcaaaagaacccgacgtgagcttagggtcaacgtggctttctgacttcccccaggcgtgggcggagactggcggaatggggttagctgtccgccaagcaccgttgatcatcccgttaaaggcaacgtctacacctgtctctatcaaacagtaccccatgagtcgtgaggcccgcctggggattaagccacatattcgtcgcttgtatgaccaggggatcttggtcccatgtcaatctccgtggaacaccccccttcgtcccgtgaaaaagccaggtacaaacgattatcgtccagttcaagatcttcgcgaggtcaacaaacgcgtagaagacatccatccgactgtacctaatccttataatctgttatcaggcctgcccccatcgcaccaatggtatacagtattagacttgaaagacgcgttcttttgcctgcgtctgcacccaacgtctcagccgctgtttgcgttcgaatggcgtgatcctgaaatgggaatttcgggtcagttaacctggactcgtctgccccagggctttaaaaacagccccacattgttcgatgaagcacttcaccgtgacttagcagacttccgtatccaacacccagacttaattctgttacagtatgttgacgaccttttgttggcggcaacgtctgaacttgactgtcagcaaggcacacgcgcgttattacaaacgttaggtaacttaggatatcgtgcgtccgcgaaaaaggcgcaaatttgtcaaaaacaggtaaagtaccttgggtatttgctgaaagaaggtcaacgttggattactgatgcgcgtaaggagaccgtaatggggcagcctacgcctaagacgccacgcgaattgcgtgaatttttgggcaaagcgggattctgtcgtttatggattcctgggttcgctgaaatggctgcacccctgtaccccttaacaaaaacagggacgcttttcaactgggggccagaccagcaaaaggcgtatcaggagatcaaacaagctttgttgaccgcacccgcgttgggtcttccggatttaaccaagccctttgagctgttcgttgatgaaaaacagggatatgcaaaaggagtattaacccaaaagttaggcccgtggcgtcgccctgttgcttacttgagtaaaaaattggatcctgtcgcagcaggatggccaccgtgcttgcgtatggtcgcggcaattgccgttttgacaaaggatgcaggtaagttgacgatgggtcaacccttaaacatcttggctccacatgctgtagaagcgttagtaaagcagcccccagaccgctggctttctaatgcgcgcatgacccactatcaggcgcttctgcttgatacggatcgtgtacaatttggaccagttgtagctttgaatccagctactttgcttccccttccagaagaagcgcttcagcacaattgtttagatattctggccgaggcacatgggacgcgccctgatttgacggatcagccactgcctgatgccgaccatacatggtatactggcggcagtagttatcttcaagaggggcaacgcaaggcgggagcagccgtcactacggagaccgaagttatctgggccaaagcgttacccgcgggaacatccgcgcaacgtgcacagttaatcgctctgacacaggccctgaagatggcagagggcaaaaagttgaatgtctacaccaactcacgttatgcttttgcaacagcgcattggcatggcgaaatttaccgccgccgtggtctgctgactagtgagggtaaggaaattaaaaataaagatgagattcttgcgttgttaaaagctttattcttaccaaaacgcctttcgatcattcattgcccggggcatcaaaagggtcactcagcggaggctcgtggaaaccgtatggcggaccaagctgcccgtaaggcggcgatcacagagaccccggatacatcaacgctgttgatcgaaaacagctctccctacactagcgagcatttttaa

SEQ ID NO: 258 - DNA, 2115 bp, synthetic construct
  source 1..2115: mol_type = other DNA
atgggcagcagccatcatcatcatcatcacagcagcggcctggtgccgcgcggcagccatatgactttaaatattgaggatgagcatcgtttacatgagacatcaaaagaacccgacgtgagcttagggtcaacgtggctttctgacttcccccaggcgtgggcggagactggcggaatggggttagctgtccgccaagcaccgttgatcatcccgttaaaggcaacgtctacacctgtctctatcaaacagtaccccatgagtcgtgaggcccgcctggggattaagccacatattcgtcgcttgtatgaccaggggatcttggtcccatgtcaatctccgtggaacaccccccttcgtcccgtgaaaaagccaggtacaaacgattatcgtccagttcaagatcttcgcgaggtcaacaaacgcgtagaagacatccatccgactgtacctaatccttataatctgttatcaggcctgcccccatcgcaccaatggtatacagtattagacttgaaagacgcgttcttttgcctgcgtctgcacccaacgtctcagccgctgtttgcgttcgaatggcgtgatcctgaaatgggaatttcgggtcagttaacctggactcgtctgccccagggctttaaaaacagccccacattgttcgatgaagcacttcaccgtgacttagcagacttccgtatccaacacccagacttaattctgttacagtatgttgacgaccttttgttggcggcaacgtctgaacttgactgtcagcaaggcacacgcgcgttattacaaacgttaggtaacttaggatatcgtgcgtccgcgaaaaaggcgcaaatttgtcaaaaacaggtaaagtaccttgggtatttgctgaaagaaggtcaacgttggattactgatgcgcgtaaggagaccgtaatggggcagcctacgcctaagacgccacgcgaattgcgtgaatttttgggcaaagcgggattctgtcgtttatggattcctgggttcgctgaaatggctgcacccctgtaccccttaacaaaaacagggacgcttttcaactgggggccagaccagcaaaaggcgtatcaggagatcaaacaagctttgttgaccgcacccgcgttgggtcttccggatttaaccaagccctttgagctgttcgttgatgaaaaacagggatatgcaaaaggagtattaacccaaaagttaggcccgtggcgtcgccctgttgcttacttgagtaaaaaattggatcctgtcgcagcaggatggccaccgtgcttgcgtatggtcgcggcaattgccgttttgacaaaggatgcaggtaagttgacgatgggtcaacccttaaacatcttggctccacatgctgtagaagcgttagtaaagcagcccccagaccgctggctttctaatgcgcgcatgacccactatcaggcgcttctgcttgatacggatcgtgtacaatttggaccagttgtagctttgaatccagctactttgcttccccttccagaagaaggacttcagcacaattgtttagatattctggccgaggcacatgggacgcgccctgatttgacggatcagccactgcctgatgccgaccatacatggtatactggcggcagtagttatcttcaagaggggcaacgcaaggcgggagcagccgtcactacggagaccgaagttatctgggccaaagcgttacccgcgggaacatccgcgcaacgtgcacagttaatcgctctgacacaggccctgaagatggcagagggcaaaaagttgaatgtctacaccaactcacgttatgcttttgcaacagcgcattggcatggcgaaatttaccgccgccgtggtctgctgactagtgagggtaaggaaattaaaaataaagatgagattcttgcgttgttaaaagctttattcttaccaaaaatgctttcgatcattcattgcccggggcatcaaaagggtcactcagcggaggctcgtggaaaccgtatggcggaccaagctgcccgtaaggcggcgatcacagagaccccggatacatcaacgctgttgatcgaaaacagctctccctacactagcgagcatttttaa

SEQ ID NO: 259 - DNA, 2115 bp, synthetic construct
  source 1..2115: mol_type = other DNA
atgggcagcagccatcatcatcatcatcacagcagcggcctggtgccgcgcggcagccatatgactttaaatattgaggatgagcatcgtttacatgagacatcaaaagaacccgacgtgagcttagggtcaacgtggctttctgacttcccccaggcgtgggcggagactggcggaatggggttagctgtccgccaagcaccgttgatcatcccgttaaaggcaacgtctacacctgtctctatcaaacagtaccccatgagtcgtgaggcccgcctggggattaagccacatattcgtcgcttgtatgaccaggggatcttggtcccatgtcaatctccgtggaacaccccccttcgtcccgtgaaaaagccaggtacaaacgattatcgtccagttcaagatcttcgcgaggtcaacaaacgcgtagaagacatccatccgactgtacctaatccttataatctgttatcaggcctgcccccatcgcaccaatggtatacagtattagacttgaaagacgcgttcttttgcctgcgtctgcacccaacgtctcagccgctgtttgcgttcgaatggcgtgatcctgaaatgggaatttcgggtcagttaacctggactcgtctgccccagggctttaaaaacagccccacattgttcgatgaagcacttcaccgtgacttagcagacttccgtatccaacacccagacttaattctgttacagtatgttgacgaccttttgttggcggcaacgtctgaacttgactgtcagcaaggcacacgcgcgttattacaaacgttaggtaacttaggatatcgtgcgtccgcgaaaaaggcgcaaatttgtcaaaaacaggtaaagtaccttgggtatttgctgaaagaaggtcaacgttggattactgatgcgcgtaaggagaccgtaatggggcagcctacgcctaagacgccacgcgaattgcgtgaatttttgggcaaagcgggattctgtcgtttatggattcctgggttcgctgaaatggctgcacccctgtaccccttaacaaaaacagggacgcttttcaactgggggccagaccagcaaaaggcgtatcaggagatcaaacaagctttgttgaccgcacccgcgttgggtcttccggatttaaccaagccctttgagctgttcgttgatgaaaaacagggatatgcaaaaggagtattaacccaaaagttaggcccgtggcgtcgccctgttgcttacttgagtaaaaaattggatcctgtcgcagcaggatggccaccgtgcttgcgtatggtcgcggcaattgccgttttgacaaaggatgcaggtaagttgacgatgggtcaacccttaaacatcttggctccacatgctgtagaagcgttagtaaagcagcccccagaccgctggctttctaatgcgcgcatgacccactatcaggcgcttctgcttgatacggatcgtgtacaatttggaccagttgtagctttgaatccagctactttgcttccccttccagaagaaggacttcagcacaattgtttagatattctggccgaggcacatgggacgcgccctgatttgacggatcagccactgcctgatgccgaccatacatggtatactggcggcagtagttatcttcaagaggggcaacgcaaggcgggagcagccgtcactacggagaccgaagttatctgggccaaagcgttacccgcgggaacatccgcgcaacgtgcacagttaatcgctctgacacaggccctgaagatggcagagggcaaaaagttgaatgtctacaccaactcacgttatgcttttgcaacagcgcattggcatggcgaaatttaccgccgccgtggtctgctgactagtgagggtaaggaaattaaaaataaagatgagattcttgcgttgttaaaagctttattcttaccaaaacgcctttcgatcattcattgcccggggcatcaaaagggtcactcagcggaggtacgtggaaaccgtatggcggaccaagctgcccgtaaggcggcgatcacagagaccccggatacatcaacgctgttgatcgaaaacagctctccctacactagcgagcatttttaa

SEQ ID NO: 260 - DNA, 2115 bp, synthetic construct
  source 1..2115: mol_type = other DNA
atgggcagcagccatcatcatcatcatcacagcagcggcctggtgccgcgcggcagccatatgactttaaatattgaggatgagcatgcgttacatgagacatcaaaagaacccgacgtgagcttagggtcaacgtggctttctgacttcccccaggcgtgggcggagactggcggaatggggttagctgtccgccaagcaccgttgatcatcccgttaaaggcaacgtctacacctgtctctatcaaacagtaccccatgagtcgtgaggcccgcctggggattaagccacatattcgtcgcttgtatgaccaggggatcttggtcccatgtcaatctccgtggaacaccccccttcgtcccgtgaaaaagccaggtacaaacgattatcgtccagttcaagatcttcgcgaggtcaacaaacgcgtagaagacatccatccgactgtacctaatccttataatctgttatcaggcctgcccccatcgcaccaatggtatacagtattagacttgaaagacgcgttcttttgcctgcgtctgcacccaacgtctcagccgctgtttgcgttcgaatggcgtgatcctgaaatgggaatttcgggtcagttaacctggactcgtctgccccagggctttaaaaacagccccacattgttcgatgaagcacttcaccgtgacttagcagacttccgtatccaacacccagacttaattctgttacagtatgttgacgaccttttgttggcggcaacgtctgaacttgactgtcagcaaggcacacgcgcgttattacaaacgttaggtaacttaggatatcgtgcgtccgcgaaaaaggcgcaaatttgtcaaaaacaggtaaagtaccttgggtatttgctgaaagaaggtcaacgttggattactgatgcgcgtaaggaggatgtaatggggcagcctacgcctaagacgccacgcgaattgcgtgaatttttgggcaaagcgggattctgtcgtttatggattcctgggttcgctgaaatggctgcacccctgtaccccttaacaaaaacagggacggagttcaactgggggccagaccagcaaaaggcgtatcaggagatcaaacaagctttgttgaccgcacccgcgttgggtcttccggatttaaccaagccctttgagctgttcgttgatgaaaaacagggatatgcaaaaggagtattaacccaaaagttaggcccgtggcgtcgccctgttgcttacttgagtaaaaaattggatcctgtcgcagcaggatggccaccgtgcttgcgtatggtcgcggcaattgccgttttgacaaaggatgcaggtaagttgacgatgggtcaacccttaaacatcttggctccacatgctgtagaagcgttagtaaagcagcccccagaccgctggctttctaatgcgcgcatgacccactatcaggcgcttctgcttgatacggatcgtgtacaatttggaccagttgtagctttgaatccagctactttgcttccccttccagaagaaggacttcagcacaattgtttagatattctggccgaggcacatgggacgcgccctgatttgacggatcagccactgcctgatgccgaccatacatggtatactggcggcagtagtcttcttcaagaggggcaacgcaaggcgggagcagccgtcactacggagaccgaagttatctgggccaaagcgttacccgcgggaacatccgcgcaacgtgcacagttaatcgctctgacacaggccctgaagatggcagagggcaaaaagttgaatgtctacaccaactcacgttatgcttttgcaacagcgcattggcatggcgaaatttaccgccgccgtggtctgctgactagtgagggtaaggaaattaaaaataaagatgagattcttgcgttgttaaaagctttattcttaccaaaacgcctttcgatcattcattgcccggggcatcaaaagggtcactcagcggaggctcgtggaaaccgtatggcggaccaagctgcccgtaaggcggcgatcacagagaccccggatacatcaacgctgttgatcgaaaacagctctccctacactagcgagcatttttaa

SEQ ID NO: 261 - DNA, 2115 bp, synthetic construct
  source 1..2115: mol_type = other DNA
atgggcagcagccatcatcatcatcatcacagcagcggcctggtgccgcgcggcagccatatgactttaaatattgaggatgagcatcgtttacatgagacatcaaaagaacccgacgtgagcttagggtcaacgtggctttctgacttcccccaggcgtgggcggagactggcggaatggggttagctgtccgccaagcaccgttgatcatcccgttaaaggcaacgtctacacctgtctctatcaaacagtaccccatgagtcgtgaggcccgcctggggattaagccacatattcgtcgcttgtatgaccaggggatcttggtcccatgtcaatctccgtggaacaccccccttcgtcccgtgaaaaagccaggtacaaacgattatcgtccagttcaagatcttcgcgaggtcaacaaacgcgtagaagacatccatccgactgtacctaatccttataatctgttatcaggcctgcccccatcgcaccaatggtatacagtattagacttgaaagacgcgttctttgcgctgcgtctgcacccaacgtctcagccgctgtttgcgttcgaatggcgtgatcctgaaatgggaatttcgggtcagttaacctggactcgtctgccccagggctttaaaaacagccccacattgttcgatgaagcacttcaccgtgacttagcagacttccgtatccaacacccagacttaattctgttacagtatgttgacgaccttttgttggcggcaacgtctgaacttgactgtcagcaaggcacacgcgcgttattacaaacgttaggtaacttaggatatcgtgcgtccgcgaaaaaggcgcaaatttgtcaaaaacaggtaaagtaccttgggtatttgctgaaagaaggtcaacgttggattactgatgcgcgtaaggaggatgtaatggggcagcctacgcctaagacgccacgcgaattgcgtgaatttttgggcaaagcgggattctgtcgtttatggattcctgggttcgctgaaatggctgcacccctgtaccccttaacaaaaacagggacggagttcaactgggggccagaccagcaaaaggcgtatcaggagatcaaacaagctttgttgaccgcacccgcgttgggtcttccggatttaaccaagccctttgagctgttcgttgatgaaaaacagggatatgcaaaaggagtattaacccaaaagttaggcccgtggcgtcgccctgttgcttacttgagtaaaaaattggatcctgtcgcagcaggatggccaccgtgcttgcgtatggtcgcggcaattgccgttttgacaaaggatgcaggtaagttgacgatgggtcaacccttaaacatcttggctccacatgctgtagaagcgttagtaaagcagcccccagaccgctggctttctaatgcgcgcatgacccactatcaggcgcttctgcttgatacggatcgtgtacaatttggaccagttgtagctttgaatccagctactttgcttccccttccagaagaaggacttcagcacaattgtttagatattctggccgaggcacatgggacgcgccctgatttgacggatcagccactgcctgatgccgaccatacatggtatactggcggcagtagtcttcttcaagaggggcaacgcaaggcgggagcagccgtcactacggagaccgaagttatctgggccaaagcgttacccgcgggaacatccgcgcaacgtgcacagttaatcgctctgacacaggccctgaagatggcagagggcaaaaagttgaatgtctacaccaactcacgttatgcttttgcaacagcgcattggcatggcgaaatttaccgccgccgtggtctgctgactagtgagggtaaggaaattaaaaataaagatgagattcttgcgttgttaaaagctttattcttaccaaaacgcctttcgatcattcattgcccggggcatcaaaagggtcactcagcggaggctcgtggaaaccgtatggcggaccaagctgcccgtaaggcggcgatcacagagaccccggatacatcaacgctgttgatcgaaaacagctctccctacactagcgagcatttttaa

SEQ ID NO: 262 - DNA, 2115 bp, synthetic construct
  source 1..2115: mol_type = other DNA
atgggcagcagccatcatcatcatcatcacagcagcggcctggtgccgcgcggcagccatatgactttaaatattgaggatgagcatcgtttacatgagacatcaaaagaacccgacgtgagcttagggtcaacgtggctttctgacttcccccaggcgtgggcggagactggcggaatggggttagctgtccgccaagcaccgttgatcatcccgttaaaggcaacgtctacacctgtctctatcaaacagtaccccatgagtcgtgaggcccgcctggggattaagccacatattcgtcgcttgtatgaccaggggatcttggtcccatgtcaatctccgtggaacaccccccttcgtcccgtgaaaaagccaggtacaaacgattatcgtccagttcaagatcttcgcgaggtcaacaaacgcgtagaagacatccatccgactgtacctaatccttataatctgttatcaggcctgcccccatcgcaccaatggtatacagtattagacttgaaagacgcgttcttttgcctgcgtctgcacccaacgtctcagccgctgtttgcgttcgaatgggaggatcctgaaatgggaatttcgggtcagttaacctggactcgtctgccccagggctttaaaaacagccccacattgttcgatgaagcacttcaccgtgacttagcagacttccgtatccaacacccagacttaattctgttacagtatgttgacgaccttttgttggcggcaacgtctgaacttgactgtcagcaaggcacacgcgcgttattacaaacgttaggtaacttaggatatcgtgcgtccgcgaaaaaggcgcaaatttgtcaaaaacaggtaaagtaccttgggtatttgctgaaagaaggtcaacgttggattactgatgcgcgtaaggaggatgtaatggggcagcctacgcctaagacgccacgcgaattgcgtgaatttttgggcaaagcgggattctgtcgtttatggattcctgggttcgctgaaatggctgcacccctgtaccccttaacaaaaacagggacggagttcaactgggggccagaccagcaaaaggcgtatcaggagatcaaacaagctttgttgaccgcacccgcgttgggtcttccggatttaaccaagccctttgagctgttcgttgatgaaaaacagggatatgcaaaaggagtattaacccaaaagttaggcccgtggcgtcgccctgttgcttacttgagtaaaaaattggatcctgtcgcagcaggatggccaccgtgcttgcgtatggtcgcggcaattgccgttttgacaaaggatgcaggtaagttgacgatgggtcaacccttaaacatcttggctccacatgctgtagaagcgttagtaaagcagcccccagaccgctggctttctaatgcgcgcatgacccactatcaggcgcttctgcttgatacggatcgtgtacaatttggaccagttgtagctttgaatccagctactttgcttccccttccagaagaaggacttcagcacaattgtttagatattctggccgaggcacatgggacgcgccctgatttgacggatcagccactgcctgatgccgaccatacatggtatactggcggcagtagtcttcttcaagaggggcaacgcaaggcgggagcagccgtcactacggagaccgaagttatctgggccaaagcgttacccgcgggaacatccgcgcaacgtgcacagttaatcgctctgacacaggccctgaagatggcagagggcaaaaagttgaatgtctacaccaactcacgttatgcttttgcaacagcgcattggcatggcgaaatttaccgccgccgtggtctgctgactagtgagggtaaggaaattaaaaataaagatgagattcttgcgttgttaaaagctttattcttaccaaaacgcctttcgatcattcattgcccggggcatcaaaagggtcactcagcggaggctcgtggaaaccgtatggcggaccaagctgcccgtaaggcggcgatcacagagaccccggatacatcaacgctgttgatcgaaaacagctctccctacactagcgagcatttttaa

SEQ ID NO: 263 - DNA, 2115 bp, synthetic construct
  source 1..2115: mol_type = other DNA
atgggcagcagccatcatcatcatcatcacagcagcggcctggtgccgcgcggcagccatatgactttaaatattgaggatgagcatcgtttacatgagacatcaaaagaacccgacgtgagcttagggtcaacgtggctttctgacttcccccaggcgtgggcggagactggcggaatggggttagctgtccgccaagcaccgttgatcatcccgttaaaggcaacgtctacacctgtctctatcaaacagtaccccatgagtcgtgaggcccgcctggggattaagccacatattcgtcgcttgtatgaccaggggatcttggtcccatgtcaatctccgtggaacaccccccttcgtcccgtgaaaaagccaggtacaaacgattatcgtccagttcaagatcttcgcgaggtcaacaaacgcgtagaagacatccatccgactgtacctaatccttataatctgttatcaggcctgcccccatcgcaccaatggtatacagtattagacttgaaagacgcgttcttttgcctgcgtctgcacccaacgtctcagccgctgtttgcgttcgaatggcgtgatcctgaaatgggaatttcgggtcagttaacctggactcgtctgccccagggctttaaaaacagccccacattgttcgatgaagcacttcaccgtgacttagcagacttccgtatccaacacccagacttaattctgttacagtatgttgacgaccttttgttggcggcaacgtctgaacttgactgtcagcaaggcacacgcgcgttattacaaacgttaggtaacttaggatatcgtgcgtccgcgaaaaaggcgcaaatttgtcaaaaacaggtaaagtaccttgggtatttgctgaaagaaggtcaacgttggattactgatgcgcgtaaggaggatgtaatggggcagcctacgcctaagacgccacgcgaattgcgtgaatttttgggcaaagcgggattctgtcgtttatggattcctgggttcgctgaaatggctgcacccctgtaccccttaacaaaaacagggacggagttcaactgggggccagaccagcaaaaggcgtatcaggagatcaaacaagctttgttgaccgcacccgcgttgggtcttccggatttaaccaagccctttgagctgttcgttgatgaaaaacagggatatgcaaaaggagtattaacccaaaagttaggcccgtggcgtcgccctgttgcttacttgagtaaaaaattggatcctgtcgcagcaggatggccaccgtgcttgcgtatggtcgcggcaattgccgttttgacaaaggatgcaggtaagttgacgatgggtcaacccttaacaatcttggctccacatgctgtagaagcgttagtaaagcagcccccagaccgctggctttctaatgcgcgcatgacccactatcaggcgcttctgcttgatacggatcgtgtacaatttggaccagttgtagctttgaatccagctactttgcttccccttccagaagaaggacttcagcacaattgtttagatattctggccgaggcacatgggacgcgccctgatttgacggatcagccactgcctgatgccgaccatacatggtatactggcggcagtagtcttcttcaagaggggcaacgcaaggcgggagcagccgtcactacggagaccgaagttatctgggccaaagcgttacccgcgggaacatccgcgcaacgtgcacagttaatcgctctgacacaggccctgaagatggcagagggcaaaaagttgaatgtctacaccaactcacgttatgcttttgcaacagcgcattggcatggcgaaatttaccgccgccgtggtctgctgactagtgagggtaaggaaattaaaaataaagatgagattcttgcgttgttaaaagctttattcttaccaaaacgcctttcgatcattcattgcccggggcatcaaaagggtcactcagcggaggctcgtggaaaccgtatggcggaccaagctgcccgtaaggcggcgatcacagagaccccggatacatcaacgctgttgatcgaaaacagctctccctacactagcgagcatttttaa

SEQ ID NO: 264 - DNA, 2115 bp, synthetic construct
  source 1..2115: mol_type = other DNA
atgggcagcagccatcatcatcatcatcacagcagcggcctggtgccgcgcggcagccatatgactttaaatattgaggatgagcatcgtttacatgagacatcaaaagaacccgacgtgagcttagggtcaacgtggctttctgacttcccccaggcgtgggcggagactggcggaatggggttagctgtccgccaagcaccgttgatcatcccgttaaaggcaacgtctacacctgtctctatcaaacagtaccccatgagtcgtgaggcccgcctggggattaagccacatattcgtcgcttgtatgaccaggggatcttggtcccatgtcaatctccgtggaacaccccccttcgtcccgtgaaaaagccaggtacaaacgattatcgtccagttcaagatcttcgcgaggtcaacaaacgcgtagaagacatccatccgactgtacctaatccttataatctgttatcaggcctgcccccatcgcaccaatggtatacagtattagacttgaaagacgcgttcttttgcctgcgtctgcacccaacgtctcagccgctgtttgcgttcgaatggcgtgatcctgaaatgggaatttcgggtcagttaacctggactcgtctgccccagggctttaaaaacagccccacattgttcgatgaagcacttcaccgtgacttagcagacttccgtatccaacacccagacttaattctgttacagtatgttgacgaccttttgttggcggcaacgtctgaacttgactgtcagcaaggcacacgcgcgttattacaaacgttaggtaacttaggatatcgtgcgtccgcgaaaaaggcgcaaatttgtcaaaaacaggtaaagtaccttgggtatttgctgaaagaaggtcaacgttggattactgatgcgcgtaaggaggatgtaatggggcagcctacgcctaagacgccacgcgaattgcgtgaatttttgggcaaagcgggattctgtcgtttatggattcctgggttcgctgaaatggctgcacccctgtaccccttaacaaaaacagggacggagttcaactgggggccagaccagcaaaaggcgtatcaggagatcaaacaagctttgttgaccgcacccgcgttgggtcttccggatttaaccaagccctttgagctgttcgttgatgaaaaacagggatatgcaaaaggagtattaacccaaaagttaggcccgtggcgtcgccctgttgcttacttgagtaaaaaattggatcctgtcgcagcaggatggccaccgtgcttgcgtatggtcgcggcaattgccgttttgacaaaggatgcaggtaagttgacgatgggtcaacccttaaacatcttggctccacatgctgtagaagcgttagtaaagcagcccccagaccgctggctttctaatgcgcgcatgacccactatcaggcgcttctgcttgataacgatcgtgtacaatttggaccagttgtagctttgaatccagctactttgcttccccttccagaagaaggacttcagcacaattgtttagatattctggccgaggcacatgggacgcgccctgatttgacggatcagccactgcctgatgccgaccatacatggtatactggcggcagtagtcttcttcaagaggggcaacgcaaggcgggagcagccgtcactacggagaccgaagttatctgggccaaagcgttacccgcgggaacatccgcgcaacgtgcacagttaatcgctctgacacaggccctgaagatggcagagggcaaaaagttgaatgtctacaccaactcacgttatgcttttgcaacagcgcattggcatggcgaaatttaccgccgccgtggtctgctgactagtgagggtaaggaaattaaaaataaagatgagattcttgcgttgttaaaagctttattcttaccaaaacgcctttcgatcattcattgcccggggcatcaaaagggtcactcagcggaggctcgtggaaaccgtatggcggaccaagctgcccgtaaggcggcgatcacagagaccccggatacatcaacgctgttgatcgaaaacagctctccctacactagcgagcatttttaa

SEQ ID NO: 265 - DNA, 1569 bp, synthetic construct
  source 1..1569: mol_type = other DNA
atgggcagcagccatcatcatcatcatcacagcagcggcctggtgccgcgcggcagccatatgactttaaatattgaggatgagcatcgtttacatgagacatcaaaagaacccgacgtgagcttagggtcaacgtggctttctgacttcccccaggcgtgggcggagactggcggaatggggttagctgtccgccaagcaccgttgatcatcccgttaaaggcaacgtctacacctgtctctatcaaacagtaccccatgagtcgtgaggcccgcctggggattaagccacatattcgtcgcttgtatgaccaggggatcttggtcccatgtcaatctccgtggaacaccccccttcgtcccgtgaaaaagccaggtacaaacgattatcgtccagttcaagatcttcgcgaggtcaacaaacgcgtagaagacatccatccgactgtacctaatccttataatctgttatcaggcctgcccccatcgcaccaatggtatacagtattagacttgaaagacgcgttcttttgcctgcgtctgcacccaacgtctcagccgctgtttgcgttcgaatggcgtgatcctgaaatgggaatttcgggtcagttaacctggactcgtctgccccagggctttaaaaacagccccacattgttcgatgaagcacttcaccgtgacttagcagacttccgtatccaacacccagacttaattctgttacagtatgttgacgaccttttgttggcggcaacgtctgaacttgactgtcagcaaggcacacgcgcgttattacaaacgttaggtaacttaggatatcgtgcgtccgcgaaaaaggcgcaaatttgtcaaaaacaggtaaagtaccttgggtatttgctgaaagaaggtcaacgttggattactgatgcgcgtaaggaggatgtaatggggcagcctacgcctaagacgccacgcgaattgcgtgaatttttgggcaaagcgggattctgtcgtttatggattcctgggttcgctgaaatggctgcacccctgtaccccttaacaaaaacagggacggagttcaactgggggccagaccagcaaaaggcgtatcaggagatcaaacaagctttgttgaccgcacccgcgttgggtcttccggatttaaccaagccctttgagctgttcgttgatgaaaaacagggatatgcaaaaggagtattaacccaaaagttaggcccgtggcgtcgccctgttgcttacttgagtaaaaaattggatcctgtcgcagcaggatggccaccgtgcttgcgtatggtcgcggcaattgccgttttgacaaaggatgcaggtaagttgacgatgggtcaacccttaaacatcttggctccacatgctgtagaagcgttagtaaagcagcccccagaccgctggctttctaatgcgcgcatgacccactatcaggcgcttctgcttgatacggatcgtgtacaatttggaccagttgtagctttgaatccagctactttgcttccccttccagaagaaggacttcagcacaattgtttagatattctggccgagtaa

SEQ ID NO: 266 - DNA, 2115 bp, synthetic construct
  source 1..2115: mol_type = other DNA
atgggcagcagccatcatcatcatcatcacagcagcggcctggtgccgcgcggcagccatatgactttaaatattgaggatgagcatcgtttacatgagacatcaaaagaacccgacgtgagcttagggtcaacgtggctttctgacttcccccaggcgtgggcggagactggcggaatggggttagctgtccgccaagcaccgttgatcatcccgttaaaggcaacgtctacacctgtctctatcaaacagtaccccatgagtcgtgaggcccgcctggggattaagccacatattcgtcgcttgtatgaccaggggatcttggtcccatgtcaatctccgtggaacaccccccttcgtcccgtgaaaaagccaggtacaaacgattatcgtccagttcaagatcttcgcgaggtcaacaaacgcgtagaagacatccatccgactgtacctaatccttataatctgttatcaggcctgcccccatcgcaccaatggtatacagtattagacttgaaagacgcgttcttttgcctgcgtctgcacccaacgtctcagccgctgtttgcgttcgaatggcgtgatcctgaaatgggaatttcgggtcagttaacctggactcgtctgccccagggctttaaaaacagccccacattgttcgatgaagcacttcaccgtgacttagcagacttccgtatccaacacccagacttaattctgttacagtatgttgacgaccttttgttggcggcaacgtctgaacttgactgtcagcaaggcacacgcgcgttattacaaacgttaggtaacttaggatatcgtgcgtccgcgaaaaaggcgcaaatttgtcaaaaacaggtaaagtaccttgggtatttgctgaaagaaggtcaacgttggattactgatgcgcgtaaggaggatgtaatggggcagcctacgcctaagacgccacgcgaattgcgtgaatttttgggcaaagcgggattctgtcgtttatggattcctgggttcgctgaaatggctgcacccctgtaccccttaacaaaaacagggacggagttcaactgggggccagaccagcaaaaggcgtatcaggagatcaaacaagctttgttgaccgcacccgcgttgggtcttccggatttaaccaagccctttgagctgttcgttgatgaaaaacagggatatgcaaaaggagtattaacccaaaagttaggcccgtggcgtcgccctgttgcttacttgagtaaaaaattggatcctgtcgcagcaggatggccaccgtgcttgcgtatggtcgcggcaattgccgttttgacaaaggatgcaggtaagttgacgatgggtcaacccttaaacatcttggctccacatgctgtagaagcgttagtaaagcagcccccagaccgctggctttctaatgcgcgcatgacccactatcaggcgcttctgcttgatacggatcgtgtacaatttggaccagttgtagctttgaatccagctactttgcttccccttccagaagaaggacttcagcacaattgtttagatattctggccgaggcacatgggacgcgccctgatttgacggatcagccactgcctgatgccgaccatacatggtatactggcggcagtagttatcttcaagaggggcaacgcaaggcgggagcagccgtcactacggagaccgaagttatctgggccaaagcgttacccgcgggaacatccgcgcaacgtgcacagttaatcgctctgacacaggccctgaagatggcagagggcaaaaagttgaatgtctacaccaactcacgttatgcttttgcaacagcgcattggcatggcgaaatttaccgccgccgtggtctgctgactagtgagggtaaggaaattaaaaataaagatgagattcttgcgttgttaaaagctttattcttaccaaaacgcctttcgatcattcattgcccggggcatcaaaagggtcactcagcggaggctcgtggaaaccgtatggcggaccaagctgcccgtaaggcggcgatcacagagaccccggatacatcaacgctgttgatcgaaaacagctctccctacactagcgagcatttttaa

SEQ ID NO: 267 - DNA, 2112 bp, synthetic construct
  source 1..2112: mol_type = other DNA
atgggcagcagccatcatcatcatcatcacagcagcggcctggtgccgcgcggcagccatatgactttaaatattgaggatgagcatcgtttacatgagacatcaaaagaacccgacgtgagcttagggtcaacgtggctttctgacttcccccaggcgtgggcggagactggcggaatggggttagctgtccgccaagcaccgttgatcatcccgttaaaggcaacgtctacacctgtctctatcaaacagtaccccatgagtcgtgaggcccgcctggggattaagccacatattcgtcgcttgtatgaccaggggatcttggtcccatgtcaatctccgtggaacaccccccttcgtcccgtgaaaaagccaggtacaaacgattatcgtccagttcaagatcttcgcgaggtcaacaaacgcgtagaagacatccatccgactgtacctaatccttataatctgttatcaggcctgcccccatcgcaccaatggtatacagtattagacttgaaagacgcgttcttttgcctgcccctgcacccaacgtctcagccgctgtttgcgttcgaatggcgtgatcctgaaatgggaatttcgggtcagttaacctggactcgtctgccccagggctttaaaaacagccccacattgttcgatgaagcacttcaccgtgacttagcagacttccgtatccaacacccagacttaattctgttacagtatgttgacgaccttttgttggcggcaacgtctgaacttgactgtcagcaaggcacacgcgcgttattacaaacgttaggtaacttaggatatcgtgcgtccgcgaaaaaggcgcaaatttgtcaaaaacaggtaaagtaccttgggtatttgctgaaagaaggtcaacgttggattactgatgcgcgtaaggagaccgtaatggggcagcctacgcctaagacgccacgcgaattgcgtgaatttttgggcaaagcgggattctgtcgtttatggattcctgggttcgctgaaatggctgcacccctgtaccccttaacaaaaacagggacgcttttcaactgggggccagaccagcaaaaggcgtatcaggagatcaaacaagctttgttgaccgcacccgcgttgggtcttccggatttaaccaagccctttgagctgttcgttgatgaaaaacagggatatgcaaaaggagtattaacccaaaagttaggcccgtggcgtcgccctgttgcttacttgagtaaaaaattggatcctgtcgcagcaggatggccaccgtgcttgcgtatggtcgcggcaattgccgttttgacaaaggatgcaggtaagttgacgatgggtcaacccttaaacatcttggctccacatgctgtagaagcgttagtaaagcagcccccagaccgctggctttctaatgcgcgcatgacccactatcaggcgcttctgcttgatacggatcgtgtacaatttggaccagttgtagctttgaatccagctactttgcttccccttccagaagaaggacttcagcacaattgtttagatattctggccgaggcacatgggacgcgccctgatttgacggatcagccactgcctgatgccgaccatacatggtatactggcggcagtagtcttcttcaagaggggcaacgcaaggcgggagcagccgtcactacggagaccgaagttatctgggccaaagcgttacccgcgggaacatccgcgcaacgtgcacagttaatcgctctgacacaggccctgaagatggcagagggcaaaaagttgaatgtctacaccaactcacgttatgcttttgcaacagcgcattggcatggcgaaatttaccgccgccgtggtctgctgactagtgagggtaaggaaattaaaaataaagatgagattcttgcgttgttaaaagctttattcttaccaaaacgcctttcgatcattcattgcccggggcatcaaaagggtcactcagcggaggctcgtggaaaccgtatggcggaccaagctgcccgtaaggcggcgatcacagagaccccggatacatcaacgctgttgatcgaaaacagctctccctacactagcgagcatttt

SEQ ID NO: 268 - DNA, 2112 bp, synthetic construct
  source 1..2112: mol_type = other DNA
atgggcagcagccatcatcatcatcatcacagcagcggcctggtgccgcgcggcagccatatgactttaaatattgaggatgagcatcgtttacatgagacatcaaaagaacccgacgtgagcttagggtcaacgtggctttctgacttcccccaggcgtgggcggagactggcggaatggggttagctgtccgccaagcaccgttgatcatcccgttaaaggcaacgtctacacctgtctctatcaaacagtaccccatgagtcgtgaggcccgcctggggattaagccacatattcgtcgcttgtatgaccaggggatcttggtcccatgtcaatctccgtggaacaccccccttcgtcccgtgaaaaagccaggtacaaacgattatcgtccagttcaagatcttcgcgaggtcaacaaacgcgtagaagacatccatccgactgtacctaatccttataatctgttatcaggcctgcccccatcgcaccaatggtatacagtattagacttgaaagacgcgttcttttgcctgtctctgcacccaacgtctcagccgctgtttgcgttcgaatggcgtgatcctgaaatgggaatttcgggtcagttaacctggactcgtctgccccagggctttaaaaacagccccacattgttcgatgaagcacttcaccgtgacttagcagacttccgtatccaacacccagacttaattctgttacagtatgttgacgaccttttgttggcggcaacgtctgaacttgactgtcagcaaggcacacgcgcgttattacaaacgttaggtaacttaggatatcgtgcgtccgcgaaaaaggcgcaaatttgtcaaaaacaggtaaagtaccttgggtatttgctgaaagaaggtcaacgttggattactgatgcgcgtaaggagaccgtaatggggcagcctacgcctaagacgccacgcgaattgcgtgaatttttgggcaaagcgggattctgtcgtttatggattcctgggttcgctgaaatggctgcacccctgtaccccttaacaaaaacagggacgcttttcaactgggggccagaccagcaaaaggcgtatcaggagatcaaacaagctttgttgaccgcacccgcgttgggtcttccggatttaaccaagccctttgagctgttcgttgatgaaaaacagggatatgcaaaaggagtattaacccaaaagttaggcccgtggcgtcgccctgttgcttacttgagtaaaaaattggatcctgtcgcagcaggatggccaccgtgcttgcgtatggtcgcggcaattgccgttttgacaaaggatgcaggtaagttgacgatgggtcaacccttaaacatcttggctccacatgctgtagaagcgttagtaaagcagcccccagaccgctggctttctaatgcgcgcatgacccactatcaggcgcttctgcttgatacggatcgtgtacaatttggaccagttgtagctttgaatccagctactttgcttccccttccagaagaaggacttcagcacaattgtttagatattctggccgaggcacatgggacgcgccctgatttgacggatcagccactgcctgatgccgaccatacatggtatactggcggcagtagtcttcttcaagaggggcaacgcaaggcgggagcagccgtcactacggagaccgaagttatctgggccaaagcgttacccgcgggaacatccgcgcaacgtgcacagttaatcgctctgacacaggccctgaagatggcagagggcaaaaagttgaatgtctacaccaactcacgttatgcttttgcaacagcgcattggcatggcgaaatttaccgccgccgtggtctgctgactagtgagggtaaggaaattaaaaataaagatgagattcttgcgttgttaaaagctttattcttaccaaaacgcctttcgatcattcattgcccggggcatcaaaagggtcactcagcggaggctcgtggaaaccgtatggcggaccaagctgcccgtaaggcggcgatcacagagaccccggatacatcaacgctgttgatcgaaaacagctctccctacactagcgagcatttt

SEQ ID NO: 269 - DNA, 2112 bp, synthetic construct
  source 1..2112: mol_type = other DNA
atgggcagcagccatcatcatcatcatcacagcagcggcctggtgccgcgcggcagccatatgactttaaatattgaggatgagcatcgtttacatgagacatcaaaagaacccgacgtgagcttagggtcaacgtggctttctgacttcccccaggcgtgggcggagactggcggaatggggttagctgtccgccaagcaccgttgatcatcccgttaaaggcaacgtctacacctgtctctatcaaacagtaccccatgagtcgtgaggcccgcctggggattaagccacatattcgtcgcttgtatgaccaggggatcttggtcccatgtcaatctccgtggaacaccccccttcgtcccgtgaaaaagccaggtacaaacgattatcgtccagttcaagatcttcgcgaggtcaacaaacgcgtagaagacatccatccgactgtacctaatccttataatctgttatcaggcctgcccccatcgcaccaatggtatacagtattagacttgaaagacgcgttcttttgcctgcgtctgcacccaacgtctcagccgctgtttgcgttcgaatggcgtgatcctgaaatgggaatttcgggtcagttaacctggactcgtctgccccagggctttaaaaacagccccacattgttcgatgaagcacttcaccgtgacttagcagacttccgtatccaacacccagacttaattctgttacagtatgttgacgaccttttgttggcggcaacgtctgaacttgactgtcagcaaggcacacgcgcgttattacaaacgttaggtaacttaggatatcgtgcgtccgcgaaaaaggcgcaaatttgtcaaaaacaggtaaagtaccttgggtatttgctgaaagaaggtcaacgttggattactgatgcgcgtaaggaggatgtaatggggcagcctacgcctaagacgccacgcgaattgcgtgaatttttgggcaaagcgggattctgtcgtttatggattcctgggttcgctgaaatggctgcacccctgtaccccttaacaaaaacagggacgcttttcaactgggggccagaccagcaaaaggcgtatcaggagatcaaacaagctttgttgaccgcacccgcgttgggtcttccggatttaaccaagccctttgagctgttcgttgatgaaaaacagggatatgcaaaaggagtattaacccaaaagttaggcccgtggcgtcgccctgttgcttacttgagtaaaaaattggatcctgtcgcagcaggatggccaccgtgcttgcgtatggtcgcggcaattgccgttttgacaaaggatgcaggtaagttgacgatgggtcaacccttaaacatcttggctccacatgctgtagaagcgttagtaaagcagcccccagaccgctggctttctaatgcgcgcatgacccactatcaggcgcttctgcttgatacggatcgtgtacaatttggaccagttgtagctttgaatccagctactttgcttccccttccagaagaaggacttcagcacaattgtttagatattctggccgaggcacatgggacgcgccctgatttgacggatcagccactgcctgatgccgaccatacatggtatactggcggcagtagtcttcttcaagaggggcaacgcaaggcgggagcagccgtcactacggagaccgaagttatctgggccaaagcgttacccgcgggaacatccgcgcaacgtgcacagttaatcgctctgacacaggccctgaagatggcagagggcaaaaagttgaatgtctacaccaactcacgttatgcttttgcaacagcgcattggcatggcgaaatttaccgccgccgtggtctgctgactagtgagggtaaggaaattaaaaataaagatgagattcttgcgttgttaaaagctttattcttaccaaaacgcctttcgatcattcattgcccggggcatcaaaagggtcactcagcggaggctcgtggaaaccgtatggcggaccaagctgcccgtaaggcggcgatcacagagaccccggatacatcaacgctgttgatcgaaaacagctctccctacactagcgagcatttt

SEQ ID NO: 270 - DNA, 2112 bp, synthetic construct
  source 1..2112: mol_type = other DNA
atgggcagcagccatcatcatcatcatcacagcagcggcctggtgccgcgcggcagccatatgactttaaatattgaggatgagcatcgtttacatgagacatcaaaagaacccgacgtgagcttagggtcaacgtggctttctgacttcccccaggcgtgggcggagactggcggaatggggttagctgtccgccaagcaccgttgatcatcccgttaaaggcaacgtctacacctgtctctatcaaacagtaccccatgagtcgtgaggcccgcctggggattaagccacatattcgtcgcttgtatgaccaggggatcttggtcccatgtcaatctccgtggaacaccccccttcgtcccgtgaaaaagccaggtacaaacgattatcgtccagttcaagatcttcgcgaggtcaacaaacgcgtagaagacatccatccgactgtacctaatccttataatctgttatcaggcctgcccccatcgcaccaatggtatacagtattagacttgaaagacgcgttcttttgcctgcgtctgcacccaacgtctcagccgctgtttgcgttcgaatggcgtgatcctgaaatgggaatttcgggtcagttaacctggactcgtctgccccagggctttaaaaacagccccacattgttcgatgaagcacttcaccgtgacttagcagacttccgtatccaacacccagacttaattctgttacagtatgttgacgaccttttgttggcggcaacgtctgaacttgactgtcagcaaggcacacgcgcgttattacaaacgttaggtaacttaggatatcgtgcgtccgcgaaaaaggcgcaaatttgtcaaaaacaggtaaagtaccttgggtatttgctgaaagaaggtcaacgttggattactgatgcgcgtaaggagaccgtaatggggcagcctacgcctaagacgccacgcgaattgcgtgaatttttgggcaaagcgggattctgtcgtttatggattcctgggttcgctgaaatggctgcacccctgtaccccttaacaaaaacagggacggagttcaactgggggccagaccagcaaaaggcgtatcaggagatcaaacaagctttgttgaccgcacccgcgttgggtcttccggatttaaccaagccctttgagctgttcgttgatgaaaaacagggatatgcaaaaggagtattaacccaaaagttaggcccgtggcgtcgccctgttgcttacttgagtaaaaaattggatcctgtcgcagcaggatggccaccgtgcttgcgtatggtcgcggcaattgccgttttgacaaaggatgcaggtaagttgacgatgggtcaacccttaaacatcttggctccacatgctgtagaagcgttagtaaagcagcccccagaccgctggctttctaatgcgcgcatgacccactatcaggcgcttctgcttgatacggatcgtgtacaatttggaccagttgtagctttgaatccagctactttgcttccccttccagaagaaggacttcagcacaattgtttagatattctggccgaggcacatgggacgcgccctgatttgacggatcagccactgcctgatgccgaccatacatggtatactggcggcagtagtcttcttcaagaggggcaacgcaaggcgggagcagccgtcactacggagaccgaagttatctgggccaaagcgttacccgcgggaacatccgcgcaacgtgcacagttaatcgctctgacacaggccctgaagatggcagagggcaaaaagttgaatgtctacaccaactcacgttatgcttttgcaacagcgcattggcatggcgaaatttaccgccgccgtggtctgctgactagtgagggtaaggaaattaaaaataaagatgagattcttgcgttgttaaaagctttattcttaccaaaacgcctttcgatcattcattgcccggggcatcaaaagggtcactcagcggaggctcgtggaaaccgtatggcggaccaagctgcccgtaaggcggcgatcacagagaccccggatacatcaacgctgttgatcgaaaacagctctccctacactagcgagcatttt

SEQ ID NO: 271 - DNA, 2112 bp, synthetic construct
  source 1..2112: mol_type = other DNA
atgggcagcagccatcatcatcatcatcacagcagcggcctggtgccgcgcggcagccatatgactttaaatattgaggatgagcatcgtttacatgagacatcaaaagaacccgacgtgagcttagggtcaacgtggctttctgacttcccccaggcgtgggcggagactggcggaatggggttagctgtccgccaagcaccgttgatcatcccgttaaaggcaacgtctacacctgtctctatcaaacagtaccccatgagtcgtgaggcccgcctggggattaagccacatattcgtcgcttgtatgaccaggggatcttggtcccatgtcaatctccgtggaacaccccccttcgtcccgtgaaaaagccaggtacaaacgattatcgtccagttcaagatcttcgcgaggtcaacaaacgcgtagaagacatccatccgactgtacctaatccttataatctgttatcaggcctgcccccatcgcaccaatggtatacagtattagacttgaaagacgcgttcttttgcctgcgtctgcacccaacgtctcagccgctgtttgcgttcgaatggcgtgatcctgaaatgggaatttcgggtcagttaacctggactcgtctgccccagggctttaaaaacagccccacattgttcgatgaagcacttcaccgtgacttagcagacttccgtatccaacacccagacttaattctgttacagtatgttgacgaccttttgttggcggcaacgtctgaacttgactgtcagcaaggcacacgcgcgttattacaaacgttaggtaacttaggatatcgtgcgtccgcgaaaaaggcgcaaatttgtcaaaaacaggtaaagtaccttgggtatttgctgaaagaaggtcaacgttggattactgatgcgcgtaaggagaccgtaatggggcagcctacgcctaagacgccacgcgaattgcgtgaatttttgggcaaagcgggattctgtcgtttatggattcctgggttcgctgaaatggctgcacccctgtaccccttaacaaaaacagggacgcttttcaactgggggccagaccagcaaaaggcgtatcaggagatcaaacaagctttgttgaccgcacccgcgttgggtcttccggatttaaccaagccctttgagctgttcgttgatgaaaaacagggatatgcaaaaggagtattaacccaaaagttaggcccgtggcgtcgccctgttgcttacttgagtaaaaaattggatcctgtcgcagcaggatggccaccgtgcttgcgtatggtcgcggcaattgccgttttgacaaaggatgcaggtaagttgacgatgggtcaacccttaaacatccatgctccacatgctgtagaagcgttagtaaagcagcccccagaccgctggctttctaatgcgcgcatgacccactatcaggcgcttctgcttgatacggatcgtgtacaatttggaccagttgtagctttgaatccagctactttgcttccccttccagaagaaggacttcagcacaattgtttagatattctggccgaggcacatgggacgcgccctgatttgacggatcagccactgcctgatgccgaccatacatggtatactggcggcagtagtcttcttcaagaggggcaacgcaaggcgggagcagccgtcactacggagaccgaagttatctgggccaaagcgttacccgcgggaacatccgcgcaacgtgcacagttaatcgctctgacacaggccctgaagatggcagagggcaaaaagttgaatgtctacaccaactcacgttatgcttttgcaacagcgcattggcatggcgaaatttaccgccgccgtggtctgctgactagtgagggtaaggaaattaaaaataaagatgagattcttgcgttgttaaaagctttattcttaccaaaacgcctttcgatcattcattgcccggggcatcaaaagggtcactcagcggaggctcgtggaaaccgtatggcggaccaagctgcccgtaaggcggcgatcacagagaccccggatacatcaacgctgttgatcgaaaacagctctccctacactagcgagcatttt

SEQ ID NO: 272 - DNA, 2112 bp, synthetic construct
  source 1..2112: mol_type = other DNA
atgggcagcagccatcatcatcatcatcacagcagcggcctggtgccgcgcggcagccatatgactttaaatattgaggatgagcatcgtttacatgagacatcaaaagaacccgacgtgagcttagggtcaacgtggctttctgacttcccccaggcgtgggcggagactggcggaatggggttagctgtccgccaagcaccgttgatcatcccgttaaaggcaacgtctacacctgtctctatcaaacagtaccccatgagtcgtgaggcccgcctggggattaagccacatattcgtcgcttgtatgaccaggggatcttggtcccatgtcaatctccgtggaacaccccccttcgtcccgtgaaaaagccaggtacaaacgattatcgtccagttcaagatcttcgcgaggtcaacaaacgcgtagaagacatccatccgactgtacctaatccttataatctgttatcaggcctgcccccatcgcaccaatggtatacagtattagacttgaaagacgcgttcttttgcctgcgtctgcacccaacgtctcagccgctgtttgcgttcgaatggcgtgatcctgaaatgggaatttcgggtcagttaacctggactcgtctgccccagggctttaaaaacagccccacattgttcgatgaagcacttcaccgtgacttagcagacttccgtatccaacacccagacttaattctgttacagtatgttgacgaccttttgttggcggcaacgtctgaacttgactgtcagcaaggcacacgcgcgttattacaaacgttaggtaacttaggatatcgtgcgtccgcgaaaaaggcgcaaatttgtcaaaaacaggtaaagtaccttgggtatttgctgaaagaaggtcaacgttggattactgatgcgcgtaaggagaccgtaatggggcagcctacgcctaagacgccacgcgaattgcgtgaatttttgggcaaagcgggattctgtcgtttatggattcctgggttcgctgaaatggctgcacccctgtaccccttaacaaaaacagggacgcttttcaactgggggccagaccagcaaaaggcgtatcaggagatcaaacaagctttgttgaccgcacccgcgttgggtcttccggatttaaccaagccctttgagctgttcgttgatgaaaaacagggatatgcaaaaggagtattaacccaaaagttaggcccgtggcgtcgccctgttgcttacttgagtaaaaaattggatcctgtcgcagcaggatggccaccgtgcttgcgtatggtcgcggcaattgccgttttgacaaaggatgcaggtaagttgacgatgggtcaacccttaaacatcttggctccacatgctgtagaagcgttagtaaagcagcccccagaccgctggctttctaatgcgcgcatgacccactatcaggcgcttctgcttgatacggatcgtgtacaatttggaccagttgtagctttgaatccagctactttgcttccccttccagaagaagcgcttcagcacaattgtttagatattctggccgaggcacatgggacgcgccctgatttgacggatcagccactgcctgatgccgaccatacatggtatactggcggcagtagtcttcttcaagaggggcaacgcaaggcgggagcagccgtcactacggagaccgaagttatctgggccaaagcgttacccgcgggaacatccgcgcaacgtgcacagttaatcgctctgacacaggccctgaagatggcagagggcaaaaagttgaatgtctacaccaactcacgttatgcttttgcaacagcgcattggcatggcgaaatttaccgccgccgtggtctgctgactagtgagggtaaggaaattaaaaataaagatgagattcttgcgttgttaaaagctttattcttaccaaaacgcctttcgatcattcattgcccggggcatcaaaagggtcactcagcggaggctcgtggaaaccgtatggcggaccaagctgcccgtaaggcggcgatcacagagaccccggatacatcaacgctgttgatcgaaaacagctctccctacactagcgagcatttt

SEQ ID NO: 273 - DNA, 2112 bp, synthetic construct
  source 1..2112: mol_type = other DNA
atgggcagcagccatcatcatcatcatcacagcagcggcctggtgccgcgcggcagccatatgactttaaatattgaggatgagcatcgtttacatgagacatcaaaagaacccgacgtgagcttagggtcaacgtggctttctgacttcccccaggcgtgggcggagactggcggaatggggttagctgtccgccaagcaccgttgatcatcccgttaaaggcaacgtctacacctgtctctatcaaacagtaccccatgagtcgtgaggcccgcctggggattaagccacatattcgtcgcttgtatgaccaggggatcttggtcccatgtcaatctccgtggaacaccccccttcgtcccgtgaaaaagccaggtacaaacgattatcgtccagttcaagatcttcgcgaggtcaacaaacgcgtagaagacatccatccgactgtacctaatccttataatctgttatcaggcctgcccccatcgcaccaatggtatacagtattagacttgaaagacgcgttcttttgcctgcgtctgcacccaacgtctcagccgctgtttgcgttcgaatggcgtgatcctgaaatgggaatttcgggtcagttaacctggactcgtctgccccagggctttaaaaacagccccacattgttcgatgaagcacttcaccgtgacttagcagacttccgtatccaacacccagacttaattctgttacagtatgttgacgaccttttgttggcggcaacgtctgaacttgactgtcagcaaggcacacgcgcgttattacaaacgttaggtaacttaggatatcgtgcgtccgcgaaaaaggcgcaaatttgtcaaaaacaggtaaagtaccttgggtatttgctgaaagaaggtcaacgttggattactgatgcgcgtaaggagaccgtaatggggcagcctacgcctaagacgccacgcgaattgcgtgaatttttgggcaaagcgggattctgtcgtttatggattcctgggttcgctgaaatggctgcacccctgtaccccttaacaaaaacagggacgcttttcaactgggggccagaccagcaaaaggcgtatcaggagatcaaacaagctttgttgaccgcacccgcgttgggtcttccggatttaaccaagccctttgagctgttcgttgatgaaaaacagggatatgcaaaaggagtattaacccaaaagttaggcccgtggcgtcgccctgttgcttacttgagtaaaaaattggatcctgtcgcagcaggatggccaccgtgcttgcgtatggtcgcggcaattgccgttttgacaaaggatgcaggtaagttgacgatgggtcaacccttaaacatcttggctccacatgctgtagaagcgttagtaaagcagcccccagaccgctggctttctaatgcgcgcatgacccactatcaggcgcttctgcttgatacggatcgtgtacaatttggaccagttgtagctttgaatccagctactttgcttccccttccagaagaaggacttcagcacaattgtttagatattctggccgaggcacatgggacgcgccctgatttgacggatcagccactgcctgatgccgaccatacatggtatactggcggcagtagtcttcttcaagaggggcaacgcaaggcgggagcagccgtcactacggagaccgaagttatctgggccaaagcgttacccgcgggaacatccgcgcaacgtgcacagttaatcgctctgacacaggccctgaagatggcagagggcaaaaagttgaatgtctacaccaactcacgttatgcttttgcaacagcgcattggcatggcgaaatttaccgccgccgtggtctgctgactagtgagggtaaggaaattaaaaataaagatgagattcttgcgttgttaaaagctttattcttaccaaaaatgctttcgatcattcattgcccggggcatcaaaagggtcactcagcggaggctcgtggaaaccgtatggcggaccaagctgcccgtaaggcggcgatcacagagaccccggatacatcaacgctgttgatcgaaaacagctctccctacactagcgagcatttt

SEQ ID NO: 274 - DNA, 2112 bp, synthetic construct
  source 1..2112: mol_type = other DNA
atgggcagcagccatcatcatcatcatcacagcagcggcctggtgccgcgcggcagccatatgactttaaatattgaggatgagcatcgtttacatgagacatcaaaagaacccgacgtgagcttagggtcaacgtggctttctgacttcccccaggcgtgggcggagactggcggaatggggttagctgtccgccaagcaccgttgatcatcccgttaaaggcaacgtctacacctgtctctatcaaacagtaccccatgagtcgtgaggcccgcctggggattaagccacatattcgtcgcttgtatgaccaggggatcttggtcccatgtcaatctccgtggaacaccccccttcgtcccgtgaaaaagccaggtacaaacgattatcgtccagttcaagatcttcgcgaggtcaacaaacgcgtagaagacatccatccgactgtacctaatccttataatctgttatcaggcctgcccccatcgcaccaatggtatacagtattagacttgaaagacgcgttcttttgcctgcgtctgcacccaacgtctcagccgctgtttgcgttcgaatggcgtgatcctgaaatgggaatttcgggtcagttaacctggactcgtctgccccagggctttaaaaacagccccacattgttcgatgaagcacttcaccgtgacttagcagacttccgtatccaacacccagacttaattctgttacagtatgttgacgaccttttgttggcggcaacgtctgaacttgactgtcagcaaggcacacgcgcgttattacaaacgttaggtaacttaggatatcgtgcgtccgcgaaaaaggcgcaaatttgtcaaaaacaggtaaagtaccttgggtatttgctgaaagaaggtcaacgttggattactgatgcgcgtaaggagaccgtaatggggcagcctacgcctaagacgccacgcgaattgcgtgaatttttgggcaaagcgggattctgtcgtttatggattcctgggttcgctgaaatggctgcacccctgtaccccttaacaaaaacagggacgcttttcaactgggggccagaccagcaaaaggcgtatcaggagatcaaacaagctttgttgaccgcacccgcgttgggtcttccggatttaaccaagccctttgagctgttcgttgatgaaaaacagggatatgcaaaaggagtattaacccaaaagttaggcccgtggcgtcgccctgttgcttacttgagtaaaaaattggatcctgtcgcagcaggatggccaccgtgcttgcgtatggtcgcggcaattgccgttttgacaaaggatgcaggtaagttgacgatgggtcaacccttaaacatcttggctccacatgctgtagaagcgttagtaaagcagcccccagaccgctggctttctaatgcgcgcatgacccactatcaggcgcttctgcttgatacggatcgtgtacaatttggaccagttgtagctttgaatccagctactttgcttccccttccagaagaaggacttcagcacaattgtttagatattctggccgaggcacatgggacgcgccctgatttgacggatcagccactgcctgatgccgaccatacatggtatactggcggcagtagtcttcttcaagaggggcaacgcaaggcgggagcagccgtcactacggagaccgaagttatctgggccaaagcgttacccgcgggaacatccgcgcaacgtgcacagttaatcgctctgacacaggccctgaagatggcagagggcaaaaagttgaatgtctacaccaactcacgttatgcttttgcaacagcgcattggcatggcgaaatttaccgccgccgtggtctgctgactagtgagggtaaggaaattaaaaataaagatgagattcttgcgttgttaaaagctttattcttaccaaaacgcctttcgatcattcattgcccggggcatcaaaagggtcactcagcggaggtacgtggaaaccgtatggcggaccaagctgcccgtaaggcggcgatcacagagaccccggatacatcaacgctgttgatcgaaaacagctctccctacactagcgagcatttt

SEQ ID NO: 275 - protein, 704 aa, synthetic construct
  REGION 1..20
MGSSHHHHHHSSGLVPRGSHMTLNIEDEHRLHETSKEPDVSLGSTWLSDFPQAWAETGGMGLAVRQAPLIIPLKATSTPVSIKQYPMSQEARLGIKPHIQRLLDQGILVPCQSPWNTPLLPVKKPGTNDYRPVQDLREVNKRVEDIHPTVPNPYNLLSGLPPSHQWYTVLDLKDAFFCLRLHPTSQPLFAFEWRDPEMGISGQLTWTRLPQGFKNSPTLFDEALHRDLADFRIQHPDLILLQYVDDLLLAATSELDCQQGTRALLQTLGNLGYRASAKKAQICQKQVKYLGYLLKEGQRWLTEARKETVMGQPTPKTPRQLREFLGTAGFCRLWIPGFAEMAAPLYPLTKTGTLFNWGPDQQKAYQEIKQALLTAPALGLPDLTKPFELFVDEKQGYAKGVLTQKLGPWRRPVAYLSKKLDPVAAGWPPCLRMVAAIAVLTKDAGKLTMGQPLVIKAPHAVEALVKQPPDRWLSNARMTHYQALLLDTDRVQFGPVVALNPATLLPLPEEGLQHNCLDILAEAHGTRPDLTDQPLPDADHTWYTDGSSLLQEGQRKAGAAVTTETEVIWAKALPAGTSAQRAELIALTQALKMAEGKKLNVYTDSRYAFATAHIHGEIYRRRGLLTSEGKEIKNKDEILALLKALFLPKRLSIIHCPGHQKGHSAEARGNRMADQAARKAAITETPDTSTLLIENSSPYTSEHF

SEQ ID NO: 276 - protein, 704 aa, synthetic construct
  REGION 1..20
MGSSHHHHHHSSGLVPRGSHMTLNIEDEHRLHETSKEPDVSLGSTWLSDFPQAWAETGGMGLAVRQAPLIIPLKATSTPVSIKQYPMSQEARLGIKPHIQRLLDQGILVPCQSPWNTPLLPVKKPGTNDYRPVQDLREVNKRVEDIHPTVPNPYNLLSGLPPSHQWYTVLDLKDAFFCLRLHPTSQPLFAFEWRDPEMGISGQLTWTRLPQGFKNSPTLFDEALHRDLADFRIQHPDLILLQYVDDLLLAATSELDCQQGTRALLQTLGNLGYRASAKKAQICQKQVKYLGYLLKEGQRWLTEARKETVMGQPTPKTPRQLREFLGTAGFCRLWIPGFAEMAAPLYPLTKTGTLFNWGPDQQKAYQEIKQALLTAPALGLPDLTKPFELFVDEKQGYAKGVLTQKLGPWRRPVAYLSKKLDPVAAGWPPCLRMVAAIAVLTKDAGKLTMGQPLVILAPHAVEALVKQPPDRWLSNARMTHYQALLLDTDRVQFGPVVALNPATLLPLPEEGLQHNCLDILAEAHGTRPDLTDQPLPDADHTWYTGGSSLLQEGQRKAGAAVTTETEVIWAKALPAGTSAQRAQLIALTQALKMAEGKKLNVYTNSRYAFATAHIHGEIYRRRGLLTSEGKEIKNKDEILALLKALFLPKRLSIIHCPGHQKGHSAEARGNRMADQAARKAAITETPDTSTLLIENSSPYTSEHF

SEQ ID NO: 277 - protein, 704 aa, synthetic construct
  REGION 1..20
MGSSHHHHHHSSGLVPRGSHMTLNIEDEHRLHETSKEPDVSLGSTWLSDFPQAWAETGGMGLAVRQAPLIIPLKATSTPVSIKQYPMSREARLGIKPHIRRLYDQGILVPCQSPWNTPLRPVKKPGTNDYRPVQDLREVNKRVEDIHPTVPNPYNLLSGLPPSHQWYTVLDLKDAFFCLRLHPTSQPLFAFEWRDPEMGISGQLTWTRLPQGFKNSPTLFDEALHRDLADFRIQHPDLILLQYVDDLLLAATSELDCQQGTRALLQTLGNLGYRASAKKAQICQKQVKYLGYLLKEGQRWITDARKETVMGQPTPKTPRELREFLGKAGFCRLWIPGFAEMAAPLYPLTKTGTLFNWGPDQQKAYQEIKQALLTAPALGLPDLTKPFELFVDEKQGYAKGVLTQKLGPWRRPVAYLSKKLDPVAAGWPPCLRMVAAIAVLTKDAGKLTMGQPLNILAPHAVEALVKQPPDRWLSNARMTHYQALLLDTDRVQFGPVVALNPATLLPLPEEGLQHNCLDILAEAHGTRPDLTDQPLPDADHTWYTGGSSLLQEGQRKAGAAVTTETEVIWAKALPAGTSAQRAQLIALTQALKMAEGKKLNVYTNSRYAFATAHWHGEIYRRRGLLTSEGKEIKNKDEILALLKALFLPKRLSIIHCPGHQKGHSAEARGNRMADQAARKAAITETPDTSTLLIENSSPYTSEHF

SEQ ID NO: 278 - protein, 704 aa, synthetic construct
  REGION 1..20
MGSSHHHHHHSSGLVPRGSHMTLNIEDEHRLHETSKEPDVSLGSTWLSDFPQAWAETGGMGLAVRQAPLIIPLKATSTPVSIKQYPMSREARLGIKPHIRRLYDQGILVPCQSPWNTPLRPVKKPGTNDYRPVQDLREVNKRVEDIHPTVPNPYNLLSGLPPSHQWYTVLDLKDAFFCLRLHPTSQPLFAFEWRDPEMGISGQLTWTRLPQGFKNSPTLFDEALHRDLADFRIQHPDLILLQYVDDLLLAATSELDCQQGTRALLQTLGNLGYRASAKKAQICQKQVKYLGYLLKEGQRWITDARKEDVMGQPTPKTPRELREFLGKAGFCRLWIPGFAEMAAPLYPLTKTGTEFNWGPDQQKAYQEIKQALLTAPALGLPDLTKPFELFVDEKQGYAKGVLTQKLGPWRRPVAYLSKKLDPVAAGWPPCLRMVAAIAVLTKDAGKLTMGQPLNIHAPHAVEALVKQPPDRWLSNARMTHYQALLLDTDRVQFGPVVALNPATLLPLPEEGLQHNCLDILAEAHGTRPDLTDQPLPDADHTWYTGGSSLLQEGQRKAGAAVTTETEVIWAKALPAGTSAQRAQLIALTQALKMAEGKKLNVYTNSRYAFATAHWHGEIYRRRGLLTSEGKEIKNKDEILALLKALFLPKRLSIIHCPGHQKGHSAEARGNRMADQAARKAAITETPDTSTLLIENSSPYTSEHF

SEQ ID NO: 279 - protein, 704 aa, synthetic construct
  REGION 1..20
MGSSHHHHHHSSGLVPRGSHMTLNIEDEHRLHETSKEPDVSLGSTWLSDFPQAWAETGGMGLAVRQAPLIIPLKATSTPVSIKQYPMSREARLGIKPHIRRLYDQGILVPCQSPWNTPLRPVKKPGTNDYRPVQDLREVNKRVEDIHPTVPNPYNLLSGLPPSHQWYTVLDLKDAFFCLRLHPTSQPLFAFEWRDPEMGISGQLTWTRLPQGFKNSPTLFDEALHRDLADFRIQHPDLILLQYVDDLLLAATSELDCQQGTRALLQTLGNLGYRASAKKAQICQKQVKYLGYLLKEGQRWITDARKEDVMGQPTPKTPRELREFLGKAGFCRLWIPGFAEMAAPLYPLTKTGTEFNWGPDQQKAYQEIKQALLTAPALGLPDLTKPFELFVDEKQGYAKGVLTQKLGPWRRPVAYLSKKLDPVAAGWPPCLRMVAAIAVLTKDAGKLTMGQPLNILAPHAVEALVKQPPDRWLSNARMTHYQALLLDTDRVQFGPVVALNPATLLPLPEEALQHNCLDILAEAHGTRPDLTDQPLPDADHTWYTGGSSLLQEGQRKAGAAVTTETEVIWAKALPAGTSAQRAQLIALTQALKMAEGKKLNVYTNSRYAFATAHWHGEIYRRRGLLTSEGKEIKNKDEILALLKALFLPKRLSIIHCPGHQKGHSAEARGNRMADQAARKAAITETPDTSTLLIENSSPYTSEHF

SEQ ID NO: 280 - protein, 704 aa, synthetic construct
  REGION 1..20
MGSSHHHHHHSSGLVPRGSHMTLNIEDEHRLHETSKEPDVSLGSTWLSDFPQAWAETGGMGLAVRQAPLIIPLKATSTPVSIKQYPMSREARLGIKPHIRRLYDQGILVPCQSPWNTPLRPVKKPGTNDYRPVQDLREVNKRVEDIHPTVPNPYNLLSGLPPSHQWYTVLDLKDAFFCLRLHPTSQPLFAFEWRDPEMGISGQLTWTRLPQGFKNSPTLFDEALHRDLADFRIQHPDLILLQYVDDLLLAATSELDCQQGTRALLQTLGNLGYRASAKKAQICQKQVKYLGYLLKEGQRWITDARKEDVMGQPTPKTPRELREFLGKAGFCRLWIPGFAEMAAPLYPLTKTGTEFNWGPDQQKAYQEIKQALLTAPALGLPDLTKPFELFVDEKQGYAKGVLTQKLGPWRRPVAYLSKKLDPVAAGWPPCLRMVAAIAVLTKDAGKLTMGQPLNILAPHAVEALVKQPPDRWLSNARMTHYQALLLDTDRVQFGPVVALNPATLLPLPEEGLQHNCLDILAEAHGTRPDLTDQPLPDADHTWYTGGSSLLQEGQRKAGAAVTTETEVIWAKALPAGTSAQRAQLIALTQALKMAEGKKLNVYTNSRYAFATAHWHGEIYRRRGLLTSEGKEIKNKDEILALLKALFLPKMLSIIHCPGHQKGHSAEARGNRMADQAARKAAITETPDTSTLLIENSSPYTSEHF

SEQ ID NO: 281 - protein, 704 aa, synthetic construct
  REGION 1..20
MGSSHHHHHHSSGLVPRGSHMTLNIEDEHRLHETSKEPDVSLGSTWLSDFPQAWAETGGMGLAVRQAPLIIPLKATSTPVSIKQYPMSREARLGIKPHIRRLYDQGILVPCQSPWNTPLRPVKKPGTNDYRPVQDLREVNKRVEDIHPTVPNPYNLLSGLPPSHQWYTVLDLKDAFFCLRLHPTSQPLFAFEWRDPEMGISGQLTWTRLPQGFKNSPTLFDEALHRDLADFRIQHPDLILLQYVDDLLLAATSELDCQQGTRALLQTLGNLGYRASAKKAQICQKQVKYLGYLLKEGQRWITDARKEDVMGQPTPKTPRELREFLGKAGFCRLWIPGFAEMAAPLYPLTKTGTEFNWGPDQQKAYQEIKQALLTAPALGLPDLTKPFELFVDEKQGYAKGVLTQKLGPWRRPVAYLSKKLDPVAAGWPPCLRMVAAIAVLTKDAGKLTMGQPLNILAPHAVEALVKQPPDRWLSNARMTHYQALLLDTDRVQFGPVVALNPATLLPLPEEGLQHNCLDILAEAHGTRPDLTDQPLPDADHTWYTGGSSLLQEGQRKAGAAVTTETEVIWAKALPAGTSAQRAQLIALTQALKMAEGKKLNVYTNSRYAFATAHWHGEIYRRRGLLTSEGKEIKNKDEILALLKALFLPKRLSIIHCPGHQKGHSAEVRGNRMADQAARKAAITETPDTSTLLIENSSPYTSEHF

SEQ ID NO: 282 - protein, 704 aa, synthetic construct
  REGION 1..20
MGSSHHHHHHSSGLVPRGSHMTLNIEDEHRLHETSKEPDVSLGSTWLSDFPQAWAETGGMGLAVRQAPLIIPLKATSTPVSIKQYPMSREARLGIKPHIRRLYDQGILVPCQSPWNTPLRPVKKPGTNDYRPVQDLREVNKRVEDIHPTVPNPYNLLSGLPPSHQWYTVLDLKDAFFCLPLHPTSQPLFAFEWRDPEMGISGQLTWTRLPQGFKNSPTLFDEALHRDLADFRIQHPDLILLQYVDDLLLAATSELDCQQGTRALLQTLGNLGYRASAKKAQICQKQVKYLGYLLKEGQRWITDARKEDVMGQPTPKTPRELREFLGKAGFCRLWIPGFAEMAAPLYPLTKTGTEFNWGPDQQKAYQEIKQALLTAPALGLPDLTKPFELFVDEKQGYAKGVLTQKLGPWRRPVAYLSKKLDPVAAGWPPCLRMVAAIAVLTKDAGKLTMGQPLNILAPHAVEALVKQPPDRWLSNARMTHYQALLLDTDRVQFGPVVALNPATLLPLPEEGLQHNCLDILAEAHGTRPDLTDQPLPDADHTWYTGGSSLLQEGQRKAGAAVTTETEVIWAKALPAGTSAQRAQLIALTQALKMAEGKKLNVYTNSRYAFATAHWHGEIYRRRGLLTSEGKEIKNKDEILALLKALFLPKRLSIIHCPGHQKGHSAEARGNRMADQAARKAAITETPDTSTLLIENSSPYTSEHF

SEQ ID NO: 283 - protein, 704 aa, synthetic construct
  REGION 1..20
MGSSHHHHHHSSGLVPRGSHMTLNIEDEHRLHETSKEPDVSLGSTWLSDFPQAWAETGGMGLAVRQAPLIIPLKATSTPVSIKQYPMSREARLGIKPHIRRLYDQGILVPCQSPWNTPLRPVKKPGTNDYRPVQDLREVNKRVEDIHPTVPNPYNLLSGLPPSHQWYTVLDLKDAFFCLRLHPTSQPLFAFEWRDPEMGISGQLTWTRLPQGFKNSPTLFDEALHRDLADFRIQHPDLILLQYVDDLLLAATSELDCQQGTRALLQTLGNLGYRASAKKAQICQKQVKYLGYLLKEGQRWITDARKEDVMGQPTPKTPRELREFLGKAGFCRLWIPGFAEMAAPLYPLTKTGTEFNWGPDQQKAYQEIKQALLTAPALGLPDLTKPFELFVDEKQGYAKGVLTQKLGPWRRPVAYLSKKLDPVAAGWPPCLRMVAAIAVLTKDAGKLTMGQPLNIHAPHAVEALVKQPPDRWLSNARMTHYQALLLDTDRVQFGPVVALNPATLLPLPEEALQHNCLDILAEAHGTRPDLTDQPLPDADHTWYTGGSSLLQEGQRKAGAAVTTETEVIWAKALPAGTSAQRAQLIALTQALKMAEGKKLNVYTNSRYAFATAHWHGEIYRRRGLLTSEGKEIKNKDEILALLKALFLPKRLSIIHCPGHQKGHSAEARGNRMADQAARKAAITETPDTSTLLIENSSPYTSEHF

SEQ ID NO: 284 - protein, 704 aa, synthetic construct
  REGION 1..20
MGSSHHHHHHSSGLVPRGSHMTLNIEDEHRLHETSKEPDVSLGSTWLSDFPQAWAETGGMGLAVRQAPLIIPLKATSTPVSIKQYPMSREARLGIKPHIRRLYDQGILVPCQSPWNTPLRPVKKPGTNDYRPVQDLREVNKRVEDIHPTVPNPYNLLSGLPPSHQWYTVLDLKDAFFCLRLHPTSQPLFAFEWRDPEMGISGQLTWTRLPQGFKNSPTLFDEALHRDLADFRIQHPDLILLQYVDDLLLAATSELDCQQGTRALLQTLGNLGYRASAKKAQICQKQVKYLGYLLKEGQRWITDARKEDVMGQPTPKTPRELREFLGKAGFCRLWIPGFAEMAAPLYPLTKTGTEFNWGPDQQKAYQEIKQALLTAPALGLPDLTKPFELFVDEKQGYAKGVLTQKLGPWRRPVAYLSKKLDPVAAGWPPCLRMVAAIAVLTKDAGKLTMGQPLNIHAPHAVEALVKQPPDRWLSNARMTHYQALLLDTDRVQFGPVVALNPATLLPLPEEGLQHNCLDILAEAHGTRPDLTDQPLPDADHTWYTGGSSLLQEGQRKAGAAVTTETEVIWAKALPAGTSAQRAQLIALTQALKMAEGKKLNVYTNSRYAFATAHWHGEIYRRRGLLTSEGKEIKNKDEILALLKALFLPKMLSIIHCPGHQKGHSAEARGNRMADQAARKAAITETPDTSTLLIENSSPYTSEHF

SEQ ID NO: 285 - protein, 704 aa, synthetic construct
  REGION 1..20
MGSSHHHHHHSSGLVPRGSHMTLNIEDEHRLHETSKEPDVSLGSTWLSDFPQAWAETGGMGLAVRQAPLIIPLKATSTPVSIKQYPMSREARLGIKPHIRRLYDQGILVPCQSPWNTPLRPVKKPGTNDYRPVQDLREVNKRVEDIHPTVPNPYNLLSGLPPSHQWYTVLDLKDAFFCLRLHPTSQPLFAFEWRDPEMGISGQLTWTRLPQGFKNSPTLFDEALHRDLADFRIQHPDLILLQYVDDLLLAATSELDCQQGTRALLQTLGNLGYRASAKKAQICQKQVKYLGYLLKEGQRWITDARKEDVMGQPTPKTPRELREFLGKAGFCRLWIPGFAEMAAPLYPLTKTGTEFNWGPDQQKAYQEIKQALLTAPALGLPDLTKPFELFVDEKQGYAKGVLTQKLGPWRRPVAYLSKKLDPVAAGWPPCLRMVAAIAVLTKDAGKLTMGQPLNIHAPHAVEALVKQPPDRWLSNARMTHYQALLLDTDRVQFGPVVALNPATLLPLPEEGLQHNCLDILAEAHGTRPDLTDQPLPDADHTWYTGGSSLLQEGQRKAGAAVTTETEVIWAKALPAGTSAQRAQLIALTQALKMAEGKKLNVYTNSRYAFATAHWHGEIYRRRGLLTSEGKEIKNKDEILALLKALFLPKRLSIIHCPGHQKGHSAEVRGNRMADQAARKAAITETPDTSTLLIENSSPYTSEHF

SEQ ID NO: 286 - protein, 704 aa, synthetic construct
  REGION 1..20
MGSSHHHHHHSSGLVPRGSHMTLNIEDEHRLHETSKEPDVSLGSTWLSDFPQAWAETGGMGLAVRQAPLIIPLKATSTPVSIKQYPMSREARLGIKPHIRRLYDQGILVPCQSPWNTPLRPVKKPGTNDYRPVQDLREVNKRVEDIHPTVPNPYNLLSGLPPSHQWYTVLDLKDAFFCLPLHPTSQPLFAFEWRDPEMGISGQLTWTRLPQGFKNSPTLFDEALHRDLADFRIQHPDLILLQYVDDLLLAATSELDCQQGTRALLQTLGNLGYRASAKKAQICQKQVKYLGYLLKEGQRWITDARKEDVMGQPTPKTPRELREFLGKAGFCRLWIPGFAEMAAPLYPLTKTGTEFNWGPDQQKAYQEIKQALLTAPALGLPDLTKPFELFVDEKQGYAKGVLTQKLGPWRRPVAYLSKKLDPVAAGWPPCLRMVAAIAVLTKDAGKLTMGQPLNIHAPHAVEALVKQPPDRWLSNARMTHYQALLLDTDRVQFGPVVALNPATLLPLPEEGLQHNCLDILAEAHGTRPDLTDQPLPDADHTWYTGGSSLLQEGQRKAGAAVTTETEVIWAKALPAGTSAQRAQLIALTQALKMAEGKKLNVYTNSRYAFATAHWHGEIYRRRGLLTSEGKEIKNKDEILALLKALFLPKRLSIIHCPGHQKGHSAEARGNRMADQAARKAAITETPDTSTLLIENSSPYTSEHF

SEQ ID NO: 287 - protein, 704 aa, synthetic construct
  REGION 1..20
MGSSHHHHHHSSGLVPRGSHMTLNIEDEHRLHETSKEPDVSLGSTWLSDFPQAWAETGGMGLAVRQAPLIIPLKATSTPVSIKQYPMSREARLGIKPHIRRLYDQGILVPCQSPWNTPLRPVKKPGTNDYRPVQDLREVNKRVEDIHPTVPNPYNLLSGLPPSHQWYTVLDLKDAFFCLRLHPTSQPLFAFEWRDPEMGISGQLTWTRLPQGFKNSPTLFDEALHRDLADFRIQHPDLILLQYVDDLLLAATSELDCQQGTRALLQTLGNLGYRASAKKAQICQKQVKYLGYLLKEGQRWITDARKEDVMGQPTPKTPRELREFLGKAGFCRLWIPGFAEMAAPLYPLTKTGTEFNWGPDQQKAYQEIKQALLTAPALGLPDLTKPFELFVDEKQGYAKGVLTQKLGPWRRPVAYLSKKLDPVAAGWPPCLRMVAAIAVLTKDAGKLTMGQPLNILAPHAVEALVKQPPDRWLSNARMTHYQALLLDTDRVQFGPVVALNPATLLPLPEEALQHNCLDILAEAHGTRPDLTDQPLPDADHTWYTGGSSLLQEGQRKAGAAVTTETEVIWAKALPAGTSAQRAQLIALTQALKMAEGKKLNVYTNSRYAFATAHWHGEIYRRRGLLTSEGKEIKNKDEILALLKALFLPKMLSIIHCPGHQKGHSAEARGNRMADQAARKAAITETPDTSTLLIENSSPYTSEHF

SEQ ID NO: 288 - protein, 704 aa, synthetic construct
  REGION 1..20
MGSSHHHHHHSSGLVPRGSHMTLNIEDEHRLHETSKEPDVSLGSTWLSDFPQAWAETGGMGLAVRQAPLIIPLKATSTPVSIKQYPMSREARLGIKPHIRRLYDQGILVPCQSPWNTPLRPVKKPGTNDYRPVQDLREVNKRVEDIHPTVPNPYNLLSGLPPSHQWYTVLDLKDAFFCLRLHPTSQPLFAFEWRDPEMGISGQLTWTRLPQGFKNSPTLFDEALHRDLADFRIQHPDLILLQYVDDLLLAATSELDCQQGTRALLQTLGNLGYRASAKKAQICQKQVKYLGYLLKEGQRWITDARKEDVMGQPTPKTPRELREFLGKAGFCRLWIPGFAEMAAPLYPLTKTGTEFNWGPDQQKAYQEIKQALLTAPALGLPDLTKPFELFVDEKQGYAKGVLTQKLGPWRRPVAYLSKKLDPVAAGWPPCLRMVAAIAVLTKDAGKLTMGQPLNILAPHAVEALVKQPPDRWLSNARMTHYQALLLDTDRVQFGPVVALNPATLLPLPEEALQHNCLDILAEAHGTRPDLTDQPLPDADHTWYTGGSSLLQEGQRKAGAAVTTETEVIWAKALPAGTSAQRAQLIALTQALKMAEGKKLNVYTNSRYAFATAHWHGEIYRRRGLLTSEGKEIKNKDEILALLKALFLPKRLSIIHCPGHQKGHSAEVRGNRMADQAARKAAITETPDTSTLLIENSSPYTSEHF

SEQ ID NO: 289 - protein, 704 aa, synthetic construct
  REGION 1..20
MGSSHHHHHHSSGLVPRGSHMTLNIEDEHRLHETSKEPDVSLGSTWLSDFPQAWAETGGMGLAVRQAPLIIPLKATSTPVSIKQYPMSREARLGIKPHIRRLYDQGILVPCQSPWNTPLRPVKKPGTNDYRPVQDLREVNKRVEDIHPTVPNPYNLLSGLPPSHQWYTVLDLKDAFFCLPLHPTSQPLFAFEWRDPEMGISGQLTWTRLPQGFKNSPTLFDEALHRDLADFRIQHPDLILLQYVDDLLLAATSELDCQQGTRALLQTLGNLGYRASAKKAQICQKQVKYLGYLLKEGQRWITDARKEDVMGQPTPKTPRELREFLGKAGFCRLWIPGFAEMAAPLYPLTKTGTEFNWGPDQQKAYQEIKQALLTAPALGLPDLTKPFELFVDEKQGYAKGVLTQKLGPWRRPVAYLSKKLDPVAAGWPPCLRMVAAIAVLTKDAGKLTMGQPLNILAPHAVEALVKQPPDRWLSNARMTHYQALLLDTDRVQFGPVVALNPATLLPLPEEALQHNCLDILAEAHGTRPDLTDQPLPDADHTWYTGGSSLLQEGQRKAGAAVTTETEVIWAKALPAGTSAQRAQLIALTQALKMAEGKKLNVYTNSRYAFATAHWHGEIYRRRGLLTSEGKEIKNKDEILALLKALFLPKRLSIIHCPGHQKGHSAEARGNRMADQAARKAAITETPDTSTLLIENSSPYTSEHF

SEQ ID NO: 290 - protein, 704 aa, synthetic construct
  REGION 1..20
MGSSHHHHHHSSGLVPRGSHMTLNIEDEHRLHETSKEPDVSLGSTWLSDFPQAWAETGGMGLAVRQAPLIIPLKATSTPVSIKQYPMSREARLGIKPHIRRLYDQGILVPCQSPWNTPLRPVKKPGTNDYRPVQDLREVNKRVEDIHPTVPNPYNLLSGLPPSHQWYTVLDLKDAFFCLPLHPTSQPLFAFEWRDPEMGISGQLTWTRLPQGFKNSPTLFDEALHRDLADFRIQHPDLILLQYVDDLLLAATSELDCQQGTRALLQTLGNLGYRASAKKAQICQKQVKYLGYLLKEGQRWITDARKEDVMGQPTPKTPRELREFLGKAGFCRLWIPGFAEMAAPLYPLTKTGTEFNWGPDQQKAYQEIKQALLTAPALGLPDLTKPFELFVDEKQGYAKGVLTQKLGPWRRPVAYLSKKLDPVAAGWPPCLRMVAAIAVLTKDAGKLTMGQPLNILAPHAVEALVKQPPDRWLSNARMTHYQALLLDTDRVQFGPVVALNPATLLPLPEEGLQHNCLDILAEAHGTRPDLTDQPLPDADHTWYTGGSSLLQEGQRKAGAAVTTETEVIWAKALPAGTSAQRAQLIALTQALKMAEGKKLNVYTNSRYAFATAHWHGEIYRRRGLLTSEGKEIKNKDEILALLKALFLPKMLSIIHCPGHQKGHSAEARGNRMADQAARKAAITETPDTSTLLIENSSPYTSEHF

SEQ ID NO: 291 - protein, 704 aa, synthetic construct; identical to SEQ ID NO: 290
  REGION 1..20

SEQ ID NO: 292 - protein, 704 aa, synthetic construct
  REGION 1..20
MGSSHHHHHHSSGLVPRGSHMTLNIEDEHRLHETSKEPDVSLGSTWLSDFPQAWAETGGMGLAVRQAPLIIPLKATSTPVSIKQYPMSREARLGIKPHIRRLYDQGILVPCQSPWNTPLRPVKKPGTNDYRPVQDLREVNKRVEDIHPTVPNPYNLLSGLPPSHQWYTVLDLKDAFFCLPLHPTSQPLFAFEWRDPEMGISGQLTWTRLPQGFKNSPTLFDEALHRDLADFRIQHPDLILLQYVDDLLLAATSELDCQQGTRALLQTLGNLGYRASAKKAQICQKQVKYLGYLLKEGQRWITDARKEDVMGQPTPKTPRELREFLGKAGFCRLWIPGFAEMAAPLYPLTKTGTEFNWGPDQQKAYQEIKQALLTAPALGLPDLTKPFELFVDEKQGYAKGVLTQKLGPWRRPVAYLSKKLDPVAAGWPPCLRMVAAIAVLTKDAGKLTMGQPLNILAPHAVEALVKQPPDRWLSNARMTHYQALLLDTDRVQFGPVVALNPATLLPLPEEGLQHNCLDILAEAHGTRPDLTDQPLPDADHTWYTGGSSLLQEGQRKAGAAVTTETEVIWAKALPAGTSAQRAQLIALTQALKMAEGKKLNVYTNSRYAFATAHWHGEIYRRRGLLTSEGKEIKNKDEILALLKALFLPKRLSIIHCPGHQKGHSAEVRGNRMADQAARKAAITETPDTSTLLIENSSPYTSEHF

SEQ ID NO: 293 - protein, 704 aa, synthetic construct
  REGION 1..20
MGSSHHHHHHSSGLVPRGSHMTLNIEDEHRLHETSKEPDVSLGSTWLSDFPQAWAETGGMGLAVRQAPLIIPLKATSTPVSIKQYPMSREARLGIKPHIRRLYDQGILVPCQSPWNTPLRPVKKPGTNDYRPVQDLREVNKRVEDIHPTVPNPYNLLSGLPPSHQWYTVLDLKDAFFCLRLHPTSQPLFAFEWRDPEMGISGQLTWTRLPQGFKNSPTLFDEALHRDLADFRIQHPDLILLQYVDDLLLAATSELDCQQGTRALLQTLGNLGYRASAKKAQICQKQVKYLGYLLKEGQRWITDARKETVMGQPTPKTPRELREFLGKAGFCRLWIPGFAEMAAPLYPLTKTGTLFNWGPDQQKAYQEIKQALLTAPALGLPDLTKPFELFVDEKQGYAKGVLTQKLGPWRRPVAYLSKKLDPVAAGWPPCLRMVAAIAVLTKDAGKLTMGQPLNILSPHAVEALVKQPPDRWLSNARMTHYQALLLDTDRVQFGPVVALNPATLLPLPEEGLQHNCLDILAEAHGTRPDLTDQPLPDADHTWYTGGSSLLQEGQRKAGAAVTTETEVIWAKALPAGTSAQRAQLIALTQALKMAEGKKLNVYTNSRYAFATAHWHGEIYRRRGLLTSEGKEIKNKDEILALLKALFLPKRLSIIHCPGHQKGHSAEARGNRMADQAARKAAITETPDTSTLLIENSSPYTSEHF

SEQ ID NO: 294 - protein, 522 aa, synthetic construct
  REGION 1..20
MGSSHHHHHHSSGLVPRGSHMTLNIEDEHRLHETSKEPDVSLGSTWLSDFPQAWAETGGMGLAVRQAPLIIPLKATSTPVSIKQYPMSREARLGIKPHIRRLYDQGILVPCQSPWNTPLRPVKKPGTNDYRPVQDLREVNKRVEDIHPTVPNPYNLLSGLPPSHQWYTVLDLKDAFFCLRLHPTSQPLFAFEWRDPEMGISGQLTWTRLPQGFKNSPTLFDEALHRDLADFRIQHPDLILLQYVDDLLLAATSELDCQQGTRALLQTLGNLGYRASAKKAQICQKQVKYLGYLLKEGQRWITDARKETVMGQPTPKTPRELREFLGKAGFCRLWIPGFAEMAAPLYPLTKTGTLFNWGPDQQKAYQEIKQALLTAPALGLPDLTKPFELFVDEKQGYAKGVLTQKLGPWRRPVAYLSKKLDPVAAGWPPCLRMVAAIAVLTKDAGKLTMGQPLNILAPHAVEALVKQPPDRWLSNARMTHYQALLLDTDRVQFGPVVALNPATLLPLPEEGLQHNCLDILAE

SEQ ID NO: 295 - protein, 556 aa, synthetic construct
  REGION 1..20
MGSSHHHHHHSSGLVPRGSHMTLNIEDEHRLHETSKEPDVSLGSTWLSDFPQAWAETGGMGLAVRQAPLIIPLKATSTPVSIKQYPMSREARLGIKPHIRRLYDQGILVPCQSPWNTPLRPVKKPGTNDYRPVQDLREVNKRVEDIHPTVPNPYNLLSGLPPSHQWYTVLDLKDAFFCLRLHPTSQPLFAFEWRDPEMGISGQLTWTRLPQGFKNSPTLFDEALHRDLADFRIQHPDLILLQYVDDLLLAATSELDCQQGTRALLQTLGNLGYRASAKKAQICQKQVKYLGYLLKEGQRWITDARKETVMGQPTPKTPRELREFLGKAGFCRLWIPGFAEMAAPLYPLTKTGTLFNWGPDQQKAYQEIKQALLTAPALGLPDLTKPFELFVDEKQGYAKGVLTQKLGPWRRPVAYLSKKLDPVAAGWPPCLRMVAAIAVLTKDAGKLTMGQPLNILAPHAVEALVKQPPDRWLSNARMTHYQALLLDTDRVQFGPVVALNPATLLPLPEEGLQHNCLDILAEAHGTRPDLTDQPLPDADHTWYTGGSSLLQEGQRK

SEQ ID NO: 296 - protein, 704 aa, synthetic construct
  REGION 1..20
MGSSHHHHHHSSGLVPRGSHMTLNIEDEHRLHETSKEPDVSLGSTWLSDFPQAWAETGGMGLAVRQAPLIIPLKATSTPVSIKQYPMSREARLGIKPHIRRLYDQGILVPCQSPWNTPLRPVKKPGTNDYRPVQDLREVNKRVEDIHPTVPNPYNLLSGLPPSHQWYTVLDLKDAFFCLRLHPTSQPLFAFEWRDPEMGISGQLTWTRLPQGFKNSPTLFDEALHRDLADFRIQHPDLILLQYVDDLLLAATSELDCQQGTRALLQTLGNLGYRASAKKAQICQKQVKYLGYLLKEGQRWITDARKETVMGQPTPKTPRELREFLGKAGFCRLWIPGFAEMAAPLYPLTKTGTLFNWGPDQQKAYQEIKQALLTAPALGLPDLTKPFELFVDEKQGYAKGVLTQKLGPWRRPVAYLSKKLDPVAAGWPPCLRMVAAIAVLTKDAGKLTMGQPLNILAPHAVEALVKQPPDRWLSNARMTHYQALLLDTDRVQFGPVVALNPATLLPLPEEGLQHNCLDILAEAHGTRPDLTDQPLPDADHTWYTGGSSLLQEGQRKAGAAVTTETEVIWAKALPAGTSAQRAQLIALTQALKMAEGKKLNVYTNSRYAFATAHWHGEIYRRRGLLTSEGKEIKNKDEILLLLKALFLPKRLSIIHCPGHQKGHSAEARGNRMADQAARKAAITETPDTSTLLIENSSPYTSEHF

SEQ ID NO: 297 - protein, 704 aa, synthetic construct
  REGION 1..20
MGSSHHHHHHSSGLVPRGSHMTLNIEDEHRLHETSKEPDVSLGSTWLSDFPQAWAETGGMGLAVRQAPLIIPLKATSTPVSIKQYPMSREARLGIKPHIRRLYDQGILVPCQSPWNTPLRPVKKPGTNDYRPVQDLREVNKRVEDIHPTVPNPYNLLSGLPPSHQWYTVLDLKDAFFALRLHPTSQPLFAFEWRDPEMGISGQLTWTRLPQGFKNSPTLFDEALHRDLADFRIQHPDLILLQYVDDLLLAATSELDCQQGTRALLQTLGNLGYRASAKKAQICQKQVKYLGYLLKEGQRWITDARKETVMGQPTPKTPRELREFLGKAGFCRLWIPGFAEMAAPLYPLTKTGTLFNWGPDQQKAYQEIKQALLTAPALGLPDLTKPFELFVDEKQGYAKGVLTQKLGPWRRPVAYLSKKLDPVAAGWPPCLRMVAAIAVLTKDAGKLTMGQPLNILAPHAVEALVKQPPDRWLSNARMTHYQALLLDTDRVQFGPVVALNPATLLPLPEEGLQHNCLDILAEAHGTRPDLTDQPLPDADHTWYTGGSSLLQEGQRKAGAAVTTETEVIWAKALPAGTSAQRAQLIALTQALKMAEGKKLNVYTNSRYAFATAHWHGEIYRRRGLLTSEGKEIKNKDEILALLKALFLPKRLSIIHCPGHQKGHSAEARGNRMADQAARKAAITETPDTSTLLIENSSPYTSEHF

SEQ ID NO: 298 - protein, 704 aa, synthetic construct
  REGION 1..20
MGSSHHHHHHSSGLVPRGSHMTLNIEDEHRLHETSKEPDVSLGSTWLSDFPQAWAETGGMGLAVRQAPLIIPLKATSTPVSIKQYPMSREARLGIKPHIRRLYDQGILVPCQSPWNTPLRPVKKPGTNDYRPVQDLREVNKRVEDIHPTVPNPYNLLSGLPPSHQWYTVLDLKDAFFCLRLHPTSQPLFAFEWRDPEMGISGQLTWTRLPQGFKNSPTLFDEALHRDLADFRIQHPDLILLQYVDDLLLAATSELDCQQGTRALLQTLGNLGYRASAKKAQICQKQVKYLGYLLKEGQRWITDARKETVMGQPTPKTPRELREFLGKAGFCRLWIPGFAEMAAPLYPLTKTGTLFNWGPDQQKAYQEIKQALLTAPALGLPDLTKPFELFVDEKQGYAKGVLTQKLGPWRRPVAYLSKKLDPVAAGWPPCLRMVAAIAVLTKDAGKLTMGQPLNILAPHAVEALVKQPPDRWLSNARMTHYQALLLDTDRVQFGPVVALNPATLLPLPEEGLQHNCLDILAEAHGTRPDLTDQPLPDADHTWYTGGSSLLQEGQRKAGAAVTTETEVIWAKALPAGTSAQRAQLIALTQALKMAEGKKLNVYTNSRYAFATAHWHGEIYRRRGLLTSEGKEIKNKPEILALLKALFLPKRLSIIHCPGHQKGHSAEARGNRMADQAARKAAITETPDTSTLLIENSSPYTSEHF

SEQ ID NO: 299 - protein, 704 aa, synthetic construct
  REGION 1..20
MGSSHHHHHHSSGLVPRGSHMTLNIEDEHRLHETSKEPDVSLGSTWLSDFPQAWAETGGMGLAVRQAPLIIPLKATSTPVSIKQYPMSREARLGIKPHIRRLYDQGILVPCQSPWNTPLRPVKKPGTNDYRPVQDLREVNKRVEDIHPTVPNPYNLLSGLPPSHQWYTVLDLKDAFFCLRLHPTSQPLFAFEWRDPEMGISGQLTWTRLPQGFKNSPTLFDEALHRDLADFRIQHPDLILLQYVDDLLLAATSELDCQQGTRALLQTLGNLGYRASAKKAQICQKQVKYLGYLLKEGQRWITDARKETVMGQPTPKTPRELREFLGKAGFCRLWIPGFAEMAAPLYPLTKTGTLFNWGPDQQKAYQEIKQALLTAPALGLPDLTKPFELFVDEKQGYAKGVLTQKLGPWRRPVAYLSKKLDPVAAGWPPCLRMVAAIAVLTKDAGKLTMGQPLNILAPHAVEALVKQPPDRWLSNARMTHYQALLLDTDRVQFGPVVALNPATLLPLPEEGLQHNCLDILAEAHGTRPDLTDQPLPDADHTWYTGGSSLLQEGQRKAGAAVTTETEVIWAKALPAGTSAQRAQLIALTQALKMAEGKKLNVYTNSRYAFATAHWHGEIYRRRGLLTSEGKEIKNKREILALLKALFLPKRLSIIHCPGHQKGHSAEARGNRMADQAARKAAITETPDTSTLLIENSSPYTSEHF

SEQ ID NO: 300 - protein, 704 aa, synthetic construct
  REGION 1..20
MGSSHHHHHHSSGLVPRGSHMTLNIEDEHRLHETSKEPDVSLGSTWLSDFPQAWAETGGMGLAVRQAPLIIPLKATSTPVSIKQYPMSREARLGIKPHIRRLYDQGILVPCQSPWNTPLRPVKKPGTNDYRPVQDLREVNKRVEDIHPTVPNPYNLLSGLPPSHQWYTVLDLKDAFFCLRLHPTSQPLFAFEWRDPEMGISGQLTWTRLPQGFKNSPTLFDEALHRDLADFRIQHPDLILLQYVDDLLLAATSELDCQQGTRALLQTLGNLGYRASAKKAQICQKQVKYLGYLLKEGQRWITDARKETVMGQPTPKTPRELREFLGKAGFCRLWIPGFAEMAAPLYPLTKTGTLFNWGPDQQKAYQEIKQALLTAPALGLPDLTKPFELFVDEKQGYAKGVLTQKLGPWRRPVAYLSKKLDPVAAGWPPCLRMVAAIAVLTKDAGKLTMGQPLNILAPHAVEALVKQPPDRWLSNARMTHYQALLLDTDRVQFGPVVALNPATLLPLPEEGLQHNCLDILAEAHGTRPDLTDQPLPDADHTWYTGGSSLLQSGQRKAGAAVTTETEVIWAKALPAGTSAQRAQLIALTQALKMAEGKKLNVYTNSRYAFATAHWHGEIYRRRGLLTSEGKEIKNKDEILALLKALFLPKRLSIIHCPGHQKGHSAEARGNRMADQAARKAAITETPDTSTLLIENSSPYTSEHF

SEQ ID NO: 301 - protein, 704 aa, synthetic construct
  REGION 1..20
MGSSHHHHHHSSGLVPRGSHMTLNIEDEHRLHETSKEPDVSLGSTWLSDFPQAWAETGGMGLAVRQAPLIIPLKATSTPVSIKQYPMSREARLGIKPHIRRLYDQGILVPCQSPWNTPLRPVKKPGTNDYRPVQDLREVNKRVEDIHPTVPNPYNLLSGLPPSHQWYTVLDLKDAFFCLRLHPTSQPLFAFEWRDPEMGISGQLTWTRLPQGFKNSPTLFDEALHRDLADFRIQHPDLILLQYVDDLLLAATSELDCQQGTRALLQTLGNLGYRASAKKAQICQKQVKYLGYLLKEGQRWITDARKETVMGQPTPKTPRELREFLGKAGFCRLWIPGFAEMAAPLYPLTKTGTLFNWGPDQQKAYQEIKQALLTAPALGLPDLTKPFELFVDEKQGYAKGVLTQKLGPWRRPVAYLSKKLDPVAAGWPPCLRMVAAIAVLTKDAGKLTMGQPLNILAPHAVEALVKQPPDRWLSNARMTHYQALLLDTDRVQFGPVVALNPATLLPLPEEGLQHNCLDILAEAHGTRPDLTDQPLPDADHTWYTGGSSLLQEGQRKAGAAVTTETEVIWAKALPAGTSAQRAQLIALTQALKMAEGKKLNVYTNSRYAFATAHWHGEIYRRRGLLTSSGKEIKNKDEILALLKALFLPKRLSIIHCPGHQKGHSAEARGNRMADQAARKAAITETPDTSTLLIENSSPYTSEHF

SEQ ID NO: 302 - protein, 704 aa, synthetic construct
  REGION 1..20
MGSSHHHHHHSSGLVPRGSHMTLNIEDPHRLHETSKEPDVSLGSTWLSDFPQAWAETGGMGLAVRQAPLIIPLKATSTPVSIKQYPMSREARLGIKPHIRRLYDQGILVPCQSPWNTPLRPVKKPGTNDYRPVQDLREVNKRVEDIHPTVPNPYNLLSGLPPSHQWYTVLDLKDAFFCLRLHPTSQPLFAFEWRDPEMGISGQLTWTRLPQGFKNSPTLFDEALHRDLADFRIQHPDLILLQYVDDLLLAATSELDCQQGTRALLQTLGNLGYRASAKKAQICQKQVKYLGYLLKEGQRWITDARKETVMGQPTPKTPRELREFLGKAGFCRLWIPGFAEMAAPLYPLTKTGTLFNWGPDQQKAYQEIKQALLTAPALGLPDLTKPFELFVDEKQGYAKGVLTQKLGPWRRPVAYLSKKLDPVAAGWPPCLRMVAAIAVLTKDAGKLTMGQPLNILAPHAVEALVKQPPDRWLSNARMTHYQALLLDTDRVQFGPVVALNPATLLPLPEEGLQHNCLDILAEAHGTRPDLTDQPLPDADHTWYTGGSSLLQEGQRKAGAAVTTETEVIWAKALPAGTSAQRAQLIALTQALKMAEGKKLNVYTNSRYAFATAHWHGEIYRRRGLLTSEGKEIKNKDEILALLKALFLPKRLSIIHCPGHQKGHSAEARGNRMADQAARKAAITETPDTSTLLIENSSPYTSEHF

SEQ ID NO: 303 - protein, 704 aa, synthetic construct
  REGION 1..20
MGSSHHHHHHSSGLVPRGSHMTLNIEDEHRLHETSKEPDVSLGSTWLSDFPQAWAETGGMGLAVRQAPLIIPLKATSTPVSIKQYPMSREARLGIKPHIRRLYDQGILVPCQSPWNTPLRPVKKPGTNDYRPVQDLREVNKRVEDIHPTVPNPYNLLSGLPPSHQWYTVLDLKDAFVCLRLHPTSQPLFAFEWRDPEMGISGQLTWTRLPQGFKNSPTLFDEALHRDLADFRIQHPDLILLQYVDDLLLAATSELDCQQGTRALLQTLGNLGYRASAKKAQICQKQVKYLGYLLKEGQRWITDARKETVMGQPTPKTPRELREFLGKAGFCRLWIPGFAEMAAPLYPLTKTGTLFNWGPDQQKAYQEIKQALLTAPALGLPDLTKPFELFVDEKQGYAKGVLTQKLGPWRRPVAYLSKKLDPVAAGWPPCLRMVAAIAVLTKDAGKLTMGQPLNILAPHAVEALVKQPPDRWLSNARMTHYQALLLDTDRVQFGPVVALNPATLLPLPEEGLQHNCLDILAEAHGTRPDLTDQPLPDADHTWYTGGSSLLQEGQRKAGAAVTTETEVIWAKALPAGTSAQRAQLIALTQALKMAEGKKLNVYTNSRYAFATAHWHGEIYRRRGLLTSEGKEIKNKDEILALLKALFLPKRLSIIHCPGHQKGHSAEARGNRMADQAARKAAITETPDTSTLLIENSSPYTSEHF

SEQ ID NO: 304 - protein, 704 aa, synthetic construct
  REGION 1..20
MGSSHHHHHHSSGLVPRGSHMTLNIEDEHRLHETSKEPDVSLGSTWLSDFPQAWAETGGMGLAVRQAPLIIPLKATSTPVSIKQYPMSREARLGIKPHIRRLYDQGILVPCQSPWNTPLRPVKKPGTNDYRPVQDLREVNKRVEDIHPTVPNPYNLLSSLPPSHQWYTVLDLKDAFFCLRLHPTSQPLFAFEWRDPEMGISGQLTWTRLPQGFKNSPTLFDEALHRDLADFRIQHPDLILLQYVDDLLLAATSELDCQQGTRALLQTLGNLGYRASAKKAQICQKQVKYLGYLLKEGQRWITDARKETVMGQPTPKTPRELREFLGKAGFCRLWIPGFAEMAAPLYPLTKTGTLFNWGPDQQKAYQEIKQALLTAPALGLPDLTKPFELFVDEKQGYAKGVLTQKLGPWRRPVAYLSKKLDPVAAGWPPCLRMVAAIAVLTKDAGKLTMGQPLNILAPHAVEALVKQPPDRWLSNARMTHYQALLLDTDRVQFGPVVALNPATLLPLPEEGLQHNCLDILAEAHGTRPDLTDQPLPDADHTWYTGGSSLLQEGQRKAGAAVTTETEVIWAKALPAGTSAQRAQLIALTQALKMAEGKKLNVYTNSRYAFATAHWHGEIYRRRGLLTSEGKEIKNKDEILALLKALFLPKRLSIIHCPGHQKGHSAEARGNRMADQAARKAAITETPDTSTLLIENSSPYTSEHF

SEQ ID NO: 305 - protein, 704 aa, synthetic construct
  REGION 1..20
MGSSHHHHHHSSGLVPRGSHMTLNIEDEHRLHETSKEPDVSLGSTWLSDFPQAWAETGGMGLAVRQAPLIIPLKATSTPVSIKQYPMSREARLGIKPHIRRLYDQGILVPCQSPWNTPLRPVKKPGTNDYRPVQDLREVNKRVEDIHPTVPNPYNLLSGLPPSHQWYTVLDLKDAFFCLRLHPTSQPLFAFEWRDPEMGISGQLTWTRLPQGFKNSPTLFDEALHRDLADFRIQHPDLILLQYVDDLLLAATSELDCQQGTRALLQTLGNLGYRASAKKAQICQKQVKYLGYLLKEGQRWITDARKETVMGQPTPKTPRELREFLGKAGFCRLWIPGFAEMAAPLYPLTKTGTLFNWGPDQQKAYQEIKQALLTAPALGLPDLTKPFELFVDEKQGYAKGVLTQKLGPWRRPVAYLSKKLDPVAAGWPPCLRMVAAIAVLTKDASKLTMGQPLNILAPHAVEALVKQPPDRWLSNARMTHYQALLLDTDRVQFGPVVALNPATLLPLPEEGLQHNCLDILAEAHGTRPDLTDQPLPDADHTWYTGGSSLLQEGQRKAGAAVTTETEVIWAKALPAGTSAQRAQLIALTQALKMAEGKKLNVYTNSRYAFATAHWHGEIYRRRGLLTSEGKEIKNKDEILALLKALFLPKRLSIIHCPGHQKGHSAEARGNRMADQAARKAAITETPDTSTLLIENSSPYTSEHF

SEQ ID NO: 306 - protein, 704 aa, synthetic construct
  REGION 1..20
MGSSHHHHHHSSGLVPRGSHMTLNIEDEHRLHETSKEPDVSLGSTWLSDFPQAWAETGGMGLAVRQAPLIIPLKATSTPVSIKQYPMSREARLGIKPHIRRLYDQGILVPCQSPWNTPLRPVKKPGTNDYRPVQDLREVNKRVEDIHPTVPNPYNLLSGLPPSHQWYTVLDLKDAFFCLRLHPTSQPLFAFEWRDPEMGISGQLTWTRLPQGFKNSPTLFDEALHRDLADFRIQHPDLILLQYVDDLLLAATSELDCQQGTRALLQTLGNLGYRASAKKAQICQKQVKYLGYLLKEGQRWITDARKETVMGQPTPKTPRELREFLGKAGFCRLWIPGFAEMAAPLYPLTKTGTLFNWGPDQQKAYQEIKQALLTAPALGLPDLTKPFELFVDEKQGYAKGVLTQKLGPWRRPVAYLSKKLDPVAAGWPPCLRMVAAIAVLTKDAGKLTMGQPLNILAPHAVEALVKQPPDRWLSNARMTHYQALLLDTDRVQFGPVVALNPATLLPLPEEGLQHNCLDILAEAHATRPDLTDQPLPDADHTWYTGGSSLLQEGQRKAGAAVTTETEVIWAKALPAGTSAQRAQLIALTQALKMAEGKKLNVYTNSRYAFATAHWHGEIYRRRGLLTSEGKEIKNKDEILALLKALFLPKRLSIIHCPGHQKGHSAEARGNRMADQAARKAAITETPDTSTLLIENSSPYTSEHF

SEQ ID NO: 307 - protein, 704 aa, synthetic construct
  REGION 1..20
MGSSHHHHHHSSGLVPRGSHMTLNIEDEHRLHETSKEPDVSLGSTWLSDFPQAWAETGGMGLAVRQAPLIIPLKATSTPVSIKQYPMSREARLGIKPHIRRLYDQGILVPCQSPWNTPLRPVKKPGTNDYRPVQDLREVNKRVEDIHPTVPNPYNLLSGLPPSHQWYTVLDLKDAFFCLRLHPTSQPLFAFEWRDPEMGISGQLTWTRLPQGFKNSPTLFDEALHRDLADFRIQHPDLILLQYVDDLLLAATSELDCQQGTRALLQTLGNLGYRASAKKAQICQKQVKYLGYLLKEGQRWITDARKETVMGQPTPKTPRELREFLGKAGFCRLWIPGFAEMAAPLYPLTKTGTLFNWGPDQQKAYQEIKQALLTAPALGLPDLTKPFELFVDEKQGYAKGVLTQKLGPWRRPVAYLSKKLDPVAAGWPPCLRMVAAIAVLTKDAGKLTMGQPLNILAPHAVEALVKQPPDRWLSNARMTHYQALLLDTDRVQFGPVVALNPATLLPLPEEGLQHNCLDILAEARGTRPDLTDQPLPDADHTWYTGGSSLLQEGQRKAGAAVTTETEVIWAKALPAGTSAQRAQLIALTQALKMAEGKKLNVYTNSRYAFATAHWHGEIYRRRGLLTSEGKEIKNKDEILALLKALFLPKRLSIIHCPGHQKGHSAEARGNRMADQAARKAAITETPDTSTLLIENSSPYTSEHF

SEQ ID NO: 308 - protein, 704 aa, synthetic construct
  REGION 1..20
MGSSHHHHHHSSGLVPRGSHMTLNIEDEHRLHETSKEPDVSLGSTWLSDFPQAWAETGGMGLAVRQAPLIIPLKATSTPVSIKQYPMSREARLGIKPHIRRLYDQGILVPCQSPWNTPLRPVKKPGTNDYRPVQDLREVNKRVEDIHPTVPNPYNLLSGLPPSHQWYTVLDLKDAFFCLRLHPTSQPLFAFEWRDPEMGISGQLTWTRLPQGFKNSPTLFDEALHRDLADFRIQHPDLILLQYVDDLLLAATSELDCQQGTRALLQTLGNLGYRASAKKAQICQKQVKYLGYLLKEGQRWITDARKETVMGQPTPKTPRELREFLGKAGFCRLWIPGFAEMAAPLYPLTKTGTLFNWGPDQQKAYQEIKQALLTAPALGLPDLTKPFELFVDEKQGYAKGVLTQKLGPWRRPVAYLSKKLDPVAAGWPPCLRMVAAIAVLTKDAGKLTMGQPLNILAPHAVEALVKQPPDRWLSNARMTHYQALLLDTDRVQFGPVVALNPATLLPLPEEGLQHNCLDILAEAHGTRPDLTDQPLPDADHTWYTGGSSLLQEGQRKAGAAVTTETEVIWAKALPAGTSAQRAQLIALTQALKMAEGKKLNVYTNSRYAFATAHWHGEIYRRRGLLTSEGKEIKNKDEVLALLKALFLPKRLSIIHCPGHQKGHSAEARGNRMADQAARKAAITETPDTSTLLIENSSPYTSEHF

SEQ ID NO: 309 - protein, 704 aa, synthetic construct
  REGION 1..20
MGSSHHHHHHSSGLVPRGSHMTLNIEDEHRLHETSKEPDVSLGSTWLSDFPQAWAETGGMGLAVRQAPLIIPLKATSTPVSIKQYPMSREARLGIKPHIRRLYDQGILVPCQSPWNTPLRPVKKPGTNDYRPVQDLREVNKRVEDIHPTVPNPYNLLSGLPPSHQWYTVLDLKDAFFCLRLHPTSQPLFAFEWRDPEMGISGQLTWTRLPQGFKNSPTLFDEALHRDLADFRIQHPDLILLQYVDDLLLAATSELDCQQGTRALLQTLGNLGYRASAKKAQICQKQVKYLGYLLKEGQRWITDARKETVMGQPTPKTPRELREFLGKAGFCRLWIPGFAEMAAPLYPLTKTGTLFNWGPDQQKAYQEIKQALLTAPALGLPDLTKPFELFVDEKQGYAKGVLTQKLGPWRRPVAYLSKKLDPVAAGWPPCLRMVAAIAVLTKDAGKLTMGQPLNILAPHAVEALVKQPPDRWLSNARMTHYQALLLDTDRVQFGPVVALNPATLLPLPEEGLQHNCLDILAEAHGTRPDLTDQPLPDADHTWYTGGSSLLQEGQRKAGAAVTTETEVIWAWALPAGTSAQRAQLIALTQALKMAEGKKLNVYTNSRYAFATAHWHGEIYRRRGLLTSEGKEIKNKDEILALLKALFLPKRLSIIHCPGHQKGHSAEARGNRMADQAARKAAITETPDTSTLLIENSSPYTSEHF

SEQ ID NO: 310 - protein, 704 aa, synthetic construct
  REGION 1..20
MGSSHHHHHHSSGLVPRGSHMTLNIEDEHRLHETSKEPDVSLGSTWLSDFPQAWAETGGMGLAVRQAPLIIPLKATSTPVSIKQYPMSREARLGIKPHIRRLYDQGILVPCQSPWNTPLRPVKKPGTNDYRPVQDLREVNKRVEDIHPTVPNPYNLASGLPPSHQWYTVLDLKDAFFCLRLHPTSQPLFAFEWRDPEMGISGQLTWTRLPQGFKNSPTLFDEALHRDLADFRIQHPDLILLQYVDDLLLAATSELDCQQGTRALLQTLGNLGYRASAKKAQICQKQVKYLGYLLKEGQRWITDARKETVMGQPTPKTPRELREFLGKAGFCRLWIPGFAEMAAPLYPLTKTGTLFNWGPDQQKAYQEIKQALLTAPALGLPDLTKPFELFVDEKQGYAKGVLTQKLGPWRRPVAYLSKKLDPVAAGWPPCLRMVAAIAVLTKDAGKLTMGQPLNILAPHAVEALVKQPPDRWLSNARMTHYQALLLDTDRVQFGPVVALNPATLLPLPEEGLQHNCLDILAEAHGTRPDLTDQPLPDADHTWYTGGSSLLQEGQRKAGAAVTTETEVIWAKALPAGTSAQRAQLIALTQALKMAEGKKLNVYTNSRYAFATAHWHGEIYRRRGLLTSEGKEIKNKDEILALLKALFLPKRLSIIHCPGHQKGHSAEARGNRMADQAARKAAITETPDTSTLLIENSSPYTSEHF

SEQ ID NO: 311 - protein, 704 aa, synthetic construct
  REGION 1..20
MGSSHHHHHHSSGLVPRGSHMTLNIEDEHRLHETSKEPDVSLGSTWLSDFPQAWAETGGMGLAVRQAPLIIPLKATSTPVSIKQYPMSREARLGIKPHIRRLYDQGILVPCQSPWNTPLRPVKKPGTNDYRPVQDLREVNKRVEDIHPTVPNPYNLLSGLPPSHQWYTVLDLKDAFFCLRLHPTSQPLFAFEWRDPEMGISGQLTWTRLPQGFKNSPTLFDEALHRDLADFRIQHPDLILLQYVDDLLLAATSELDCQQGTRALLQTLGNLGYRASAKKAQICQKQVKYLGYLLKEGQRWITDARKETVMGQPTPKTPRELREFLGKAGFCRLWIPGFAEMAAPLYPLTKTGTLFNWGPDQQKAYQEIKQALLTAPALGLPDLTKPFELFVDEKQGYAKGVLTQKLGPWRRPVAYLSKKLDPVAAGWPPCLRMVAAIAVLTKDAGKLTMGQPLNIHAPHAVEALVKQPPDRWLSNARMTHYQALLLDTDRVQFGPVVALNPATLLPLPEEGLQHNCLDILAEAHGTRPDLTDQPLPDADHTWYTGGSSLLQEGQRKAGAAVTTETEVIWAKALPAGTSAQRAQLIALTQALKMAEGKKLNVYTNSRYAFATAHWHGEIYRRRGLLTSEGKEIKNKDEILALLKALFLPKRLSIIHCPGHQKGHSAEARGNRMADQAARKAAITETPDTSTLLIENSSPYTSEHF

SEQ ID NO: 312 - protein, 704 aa, synthetic construct
  REGION 1..20
MGSSHHHHHHSSGLVPRGSHMTLNIEDEHRLHETSKEPDVSLGSTWLSDFPQAWAETGGMGLAVRQAPLIIPLKATSTPVSIKQYPMSREARLGIKPHIRRLYDQGILVPCQSPWNTPLRPVKKPGTNDYRPVQDLREVNKRVEDIHPTVPNPYNLLSGLPPSHQWYTVLDLKDAFFCLRLHPTSQPLFAFEWRDPEMGISGQLTWTRLPQGFKNSPTLFDEALHRDLADFRIQHPDLILLQYVDDLLLAATSELDCQQGTRALLQTLGNLGYRASAKKAQICQKQVKYLGYLLKEGQRWITDARKETVMGQPTPKTPRELREFLGKAGFCRLWIPGFAEMAAPLYPLTKTGTLFNWGPDQQKAYQEIKQALLTAPALGLPDLTKPFELFVDEKQGYAKGVLTQKLGPWRRPVAYLSKKLDPVAAGWPPCLRMVAAIAVLTKDAGKLTMGQPLNILAPHAVEALVKQPPDRWLSNARMTHYQALLLDTDRVQFGPVVALNPATLLPLPEEGTQHNCLDILAEAHGTRPDLTDQPLPDADHTWYTGGSSLLQEGQRKAGAAVTTETEVIWAKALPAGTSAQRAQLIALTQALKMAEGKKLNVYTNSRYAFATAHWHGEIYRRRGLLTSEGKEIKNKDEILALLKALFLPKRLSIIHCPGHQKGHSAEARGNRMADQAARKAAITETPDTSTLLIENSSPYTSEHF

SEQ ID NO: 313 - protein, 704 aa, synthetic construct
  REGION 1..20
MGSSHHHHHHSSGLVPRGSHMTLNIEDEHRLHETSKEPDVSLGSTWLSDFPQAWAETGGMGLAVRQAPLIIPLKATSTPVSIKQYPMSREARLGIKPHIRRLYDQGILVPCQSPWNTPLRPVKKPGTNDYRPVQDLREVNKRVEDIHPTVPNPYNLLSGLPPSHQWYTVLDLKDAFFCLRLHPTSQPLFAFEWRDPEMGISGQLTWTRLPQGFKNSPTLFDEALHRDLADFRIQHPDLILLQYVDDLLLAATSELDCQQGTRALLQTLGNLGYRASAKKAQICQKQVKYLGYLLKEGQRWITDARKETVMGQPTPKTPRELREFLGKAGFCRLWIPGFAEMAAPLYPLTKTGTLFNWGPDQQKAYQEIKQALLTAPALGLPDLTKPFELFVDEKQGYAKGVLTQKLGPWRRPVAYLSKKLDPVAAGWPPCLRMVAAIAVLTKDAGKLTMGQPLNILAPHAVEALVKQPPDRWLSNARMTHYQALLLDTDRVQFGPVVALNPATLLPLPEEGLQHNCLDILAEAHGTRPDLTDQPLPDADHTWYTGGSSVLQEGQRKAGAAVTTETEVIWAKALPAGTSAQRAQLIALTQALKMAEGKKLNVYTNSRYAFATAHWHGEIYRRRGLLTSEGKEIKNKDEILALLKALFLPKRLSIIHCPGHQKGHSAEARGNRMADQAARKAAITETPDTSTLLIENSSPYTSEHF

SEQ ID NO: 314 - protein, 704 aa, synthetic construct
  REGION 1..20
MGSSHHHHHHSSGLVPRGSHMTLNIEDEHRLHETSKEPDVSLGSTWLSDFPQAWAETGGMGLAVRQAPLIIPLKATSTPVSIKQYPMSREARLGIKPHIRRLYDQGILVPCQSPWNTPLRPVKKPGTNDYRPVQDLREVNKRVEDIHPTVPNPYNLLSGLPPSHQWYTVLDLKDAFFCLRLHPTSQPLFAFEWRDPEMGISGQLTWTRLPQGFKNSPTLFDEALHRDLADFRIQHPDLILLQYVDDLLLAATSELDCQQGTRALLQTLGNLGYRASAKKAQICQKQVKYLGYLLKEGQRWITDARKETVMGQPTPKTPRELREFLGKAGFCRLWIPGFAEMAAPLYPLTKTGTLFNWGPDQQKAYQEIKQALLTAPALGLPDLTKPFELFVDEKQGYAKGVLTQKLGPWRRPVAYLSKKLDPVAAGWPPCLRMVAAIAVLTKDAGKLTMGQPLNILAPHAVEALVKQPPDRWLSNARMTHYQALLLDTDRVQFGPVVALNPATLLPLPEEGLQHNCLDILAEAHGTRPDLTDQPLPDADHTWYTGGSSYLQEGQRKAGAAVTTETEVIWAKALPAGTSAQRAQLIALTQALKMAEGKKLNVYTNSRYAFATAHWHGEIYRRRGLLTSEGKEIKNKDEILALLKALFLPKRLSIIHCPGHQKGHSAEARGNRMADQAARKAAITETPDTSTLLIENSSPYTSEHF

SEQ ID NO: 315 - protein, 704 aa, synthetic construct
  REGION 1..20
MGSSHHHHHHSSGLVPRGSHMTLNIEDEHRLHETSKEPDVSLGSTWLSDFPQAWAETGGMGLAVRQAPLIIPLKATSTPVSIKQYPMSREARLGIKPHIRRLYDQGILVPCQSPWNTPLRPVKKPGTNDYRPVQDLREVNKRVEDIHPTVPNPYNLLSGLPPSHQWYTVLDLKDAFFCLRLHPTSQPLFAFEWRDPEMGISGQLTWTRLPQGFKNSPTLFDEALHRDLADFRIQHPDLILLQYVDDLLLAATSELDCQQGTRALLQTLGNLGYRASAKKAQICQKQVKYLGYLLKEGQRWITDARKETVMGQPTPKTPRELREFLGKAGFCRLWIPGFAEMAAPLYPLTKTGTLFNWGPDQQKAYQEIKQALLTAPALGLPDLTKPFELFVDEKQGYAKGVLTQKLGPWRRPVAYLSKKLDPVAAGWPPCLRMVAAIAVLTKDAGKLTMGQPLNILAPHAVEALVKQPPDRWLSNARMTHYQALLLDTDRVQFGPVVALNPATLLPLPEEGLQHNCLDILAEAHGTRPDLTDQPLPDADHTWYTGGSSLLQEGQRKAGAAVTTETEVIWAKALPAGTSAQRAQLIALTQALKMAEGKKLNVYTNSRYAFATAHWHGEIYRRRGLGTSEGKEIKNKDEILALLKALFLPKRLSIIHCPGHQKGHSAEARGNRMADQAARKAAITETPDTSTLLIENSSPYTSEHF

SEQ ID NO: 316 - protein, 704 aa, synthetic construct
  REGION 1..20
MGSSHHHHHHSSGLVPRGSHMTLNIEDEHRLHETSKEPDVSLGSTWLSDFPQAWAETGGMGLAVRQAPLIIPLKATSTPVSIKQYPMSREARLGIKPHIRRLYDQGILVPCQSPWNTPLRPVKKPGTNDYRPVQDLREVNKRVEDIHPTVPNPYNLLSGLPPSHQWYTVLDLKDAFFCLRLHPTSQPLFAFEWRDPEMGISGQLTWTRLPQGFKNSPTLFDEALHRDLADFRIQHPDLILLQYVDDLLLAATSELDCQQGTRALLQTLGNLGYRASAKKAQICQKQVKYLGYLLKEGQRWITDARKETVMGQPTPKTPRELREFLGKAGFCRLWIPGFAEMAAPLYPLTKTGTLFNWGPDQQKAYQEIKQALLTAPALGLPDLTKPFELFVDEKQGYAKGVLTQKLGPWRRPVAYLSKKLDPVAAGWPPCLRMVAAIAVLTKDAGKLTMGQPLTILAPHAVEALVKQPPDRWLSNARMTHYQALLLDTDRVQFGPVVALNPATLLPLPEEGLQHNCLDILAEAHGTRPDLTDQPLPDADHTWYTGGSSLLQEGQRKAGAAVTTETEVIWAKALPAGTSAQRAQLIALTQALKMAEGKKLNVYTNSRYAFATAHWHGEIYRRRGLLTSEGKEIKNKDEILALLKALFLPKRLSIIHCPGHQKGHSAEARGNRMADQAARKAAITETPDTSTLLIENSSPYTSEHF

SEQ ID NO: 317 - protein, 704 aa, synthetic construct
  REGION 1..20
MGSSHHHHHHSSGLVPRGSHMTLNIEDEHRLHETSKEPDVSLGSTWLSDFPQAWAETGGMGLAVRQAPLIIPLKATSTPVSIKQYPMSREARLGIKPHIRRLYDQGILVPCQSPWNTPLRPVKKPGTNDYRPVQDLREVNKRVEDIHPTVPNPYNLLSGLPPSHQWYTVLDLKDAFFCLRLHPTSQPLFAFEWRDPEMGISGQLTWTRLPQGFKNSATLFDEALHRDLADFRIQHPDLILLQYVDDLLLAATSELDCQQGTRALLQTLGNLGYRASAKKAQICQKQVKYLGYLLKEGQRWITDARKETVMGQPTPKTPRELREFLGKAGFCRLWIPGFAEMAAPLYPLTKTGTLFNWGPDQQKAYQEIKQALLTAPALGLPDLTKPFELFVDEKQGYAKGVLTQKLGPWRRPVAYLSKKLDPVAAGWPPCLRMVAAIAVLTKDAGKLTMGQPLNILAPHAVEALVKQPPDRWLSNARMTHYQALLLDTDRVQFGPVVALNPATLLPLPEEGLQHNCLDILAEAHGTRPDLTDQPLPDADHTWYTGGSSLLQEGQRKAGAAVTTETEVIWAKALPAGTSAQRAQLIALTQALKMAEGKKLNVYTNSRYAFATAHWHGEIYRRRGLLTSEGKEIKNKDEILALLKALFLPKRLSIIHCPGHQKGHSAEARGNRMADQAARKAAITETPDTSTLLIENSSPYTSEHF

SEQ ID NO: 318 - protein, 704 aa, synthetic construct
  REGION 1..20
MGSSHHHHHHSSGLVPRGSHMTLNIEDEHRLHETSKEPDVSLGSTWLSDFPQAWAETGGMGLAVRQAPLIIPLKATSTPVSIKQYPMSREARLGIKPHIRRLYDQGILVPCQSPWNTPLRPVKKPGTNDYRPVQDLREVNKRVEDIHPTVPNPYNLLSGLPPSHQWYTVLDLKDAFFCLRLHPTSQPLFAFEWRDPEMGISGQLTWTRLPQGFKNSHTLFDEALHRDLADFRIQHPDLILLQYVDDLLLAATSELDCQQGTRALLQTLGNLGYRASAKKAQICQKQVKYLGYLLKEGQRWITDARKETVMGQPTPKTPRELREFLGKAGFCRLWIPGFAEMAAPLYPLTKTGTLFNWGPDQQKAYQEIKQALLTAPALGLPDLTKPFELFVDEKQGYAKGVLTQKLGPWRRPVAYLSKKLDPVAAGWPPCLRMVAAIAVLTKDAGKLTMGQPLNILAPHAVEALVKQPPDRWLSNARMTHYQALLLDTDRVQFGPVVALNPATLLPLPEEGLQHNCLDILAEAHGTRPDLTDQPLPDADHTWYTGGSSLLQEGQRKAGAAVTTETEVIWAKALPAGTSAQRAQLIALTQALKMAEGKKLNVYTNSRYAFATAHWHGEIYRRRGLLTSEGKEIKNKDEILALLKALFLPKRLSIIHCPGHQKGHSAEARGNRMADQAARKAAITETPDTSTLLIENSSPYTSEHF

SEQ ID NO: 319 - protein, 704 aa, synthetic construct
  REGION 1..20
MGSSHHHHHHSSGLVPRGSHMTLNIEDEHRLHETSKEPDVSLGSTWLSDFPQAWAETGGMGLAVRQAPLIIPLKATSTPVSIKQYPMSREARLGIKPHIRRLYDQGILVPCQSPWNTPLRPVKKPGTNDYRPVQDLREVNKRVEDIHPTVPNPYNLLSGLPPSHQWYTVLDLKDAFFCLRLHPTSQPLFAFEWRDPEMGISGQLTWTRLPQGFKNSLTLFDEALHRDLADFRIQHPDLILLQYVDDLLLAATSELDCQQGTRALLQTLGNLGYRASAKKAQICQKQVKYLGYLLKEGQRWITDARKETVMGQPTPKTPRELREFLGKAGFCRLWIPGFAEMAAPLYPLTKTGTLFNWGPDQQKAYQEIKQALLTAPALGLPDLTKPFELFVDEKQGYAKGVLTQKLGPWRRPVAYLSKKLDPVAAGWPPCLRMVAAIAVLTKDAGKLTMGQPLNILAPHAVEALVKQPPDRWLSNARMTHYQALLLDTDRVQFGPVVALNPATLLPLPEEGLQHNCLDILAEAHGTRPDLTDQPLPDADHTWYTGGSSLLQEGQRKAGAAVTTETEVIWAKALPAGTSAQRAQLIALTQALKMAEGKKLNVYTNSRYAFATAHWHGEIYRRRGLLTSEGKEIKNKDEILALLKALFLPKRLSIIHCPGHQKGHSAEARGNRMADQAARKAAITETPDTSTLLIENSSPYTSEHF

SEQ ID NO: 320 - protein, 704 aa, synthetic construct
  REGION 1..20
MGSSHHHHHHSSGLVPRGSHMTLNIEDEHRLHETSKEPDVSLGSTWLSDFPQAWAETGGMGLAVRQAPLIIPLKATSTPVSIKQYPMSREARLGIKPHIRRLYDQGILVPCQSPWNTPLRPVKKPGTNDYRPVQDLREVNKRVEDIHPTVPNPYNLLSGLPPSHQWYTVLDLKDAFFCLRLHPTSQPLFAFEWRDPEMGISGQLTWTRLPQGFKNSPTLFDEALHRDLADFRIQHPDLILLQYVDDLLLAATSELDCQQGTRALLQTLGNLGYRASAKKAQICQKQVKYLGYLLKEGQRWITDARKETVMGQPTPKTPRELREFLGKAGFCRLWIPGFAEMAAPLYPLTKTGTLFNWGPDQQKAYQEIKQALLTAPALGLPDLTKPFELFVDEKQGYAKGVLTQKLGPWRRPVAYLSKKLDLVAAGWPPCLRMVAAIAVLTKDAGKLTMGQPLNILAPHAVEALVKQPPDRWLSNARMTHYQALLLDTDRVQFGPVVALNPATLLPLPEEGLQHNCLDILAEAHGTRPDLTDQPLPDADHTWYTGGSSLLQEGQRKAGAAVTTETEVIWAKALPAGTSAQRAQLIALTQALKMAEGKKLNVYTNSRYAFATAHWHGEIYRRRGLLTSEGKEIKNKDEILALLKALFLPKRLSIIHCPGHQKGHSAEARGNRMADQAARKAAITETPDTSTLLIENSSPYTSEHF

SEQ ID NO: 321 - protein, 704 aa, synthetic construct
  REGION 1..20
MGSSHHHHHHSSGLVPRGSHMTLNIEDEHRLHETSKEPDVSLGSTWLSDFPQAWAETGGMGLAVRQAPLIIPLKATSTPVSIKQYPMSREARLGIKPHIRRLYDQGILVPCQSPWNTPLRPVKKPGTNDYRPVQDLREVNKRVEDIHPTVPNPYNLLSGLPPSHQWYTVLDLKDAFFCLRLHPTSQPLFAFEWRDPEMGISGQLTWTRLPQGFKNSPTLFDEALHRDLADFRIQHPDLILLQYVDDLLLAATSELDCQQGTRALLQTLGNLGYRASAKKAQICQKQVKYLGYLLKEGQRWITDARKETVMGQPTPKTPRELREFLGKAGFCRLWIPGFAEMAAPLYPLTKTGTLFNWGPDQQKAYQEIKQALLTAPALGLPDLTKPFELFVDEKLGYAKGVLTQKLGPWRRPVAYLSKKLDPVAAGWPPCLRMVAAIAVLTKDAGKLTMGQPLNILAPHAVEALVKQPPDRWLSNARMTHYQALLLDTDRVQFGPVVALNPATLLPLPEEGLQHNCLDILAEAHGTRPDLTDQPLPDADHTWYTGGSSLLQEGQRKAGAAVTTETEVIWAKALPAGTSAQRAQLIALTQALKMAEGKKLNVYTNSRYAFATAHWHGEIYRRRGLLTSEGKEIKNKDEILALLKALFLPKRLSIIHCPGHQKGHSAEARGNRMADQAARKAAITETPDTSTLLIENSSPYTSEHF

SEQ ID NO: 322 - protein, 704 aa, synthetic construct
  REGION 1..20
MGSSHHHHHHSSGLVPRGSHMTLNIEDEHRLHETSKEPDVSLGSTWLSDFPQAWAETGGMGLAVRQAPLIIPLKATSTPVSIKQYPMSREARLGIKPHIRRLYDQGILVPCQSPWNTPLRPVKKPGTNDYRPVQDLREVNKRVEDIHPTVPNPYNLLSGLPPSHQWYTVLDLKDAFFCLRLHPTSQPLFAFEWRDPEMGISGQLTWTRLPQGFKNSPTLFDEALHRDLADFRIQHPDLILLQYVDDLLLAATSELDCQQGTRALLQTLGNLGYRASAKKAQICQKQVKYLGYLLKEGQRWITDARKETVMGQPTPKTPRELREFLGKAGFCRLWIPGFAEMAAPLYPLTKTGTLFNWGPDQQKAYQEIKQALLTAPALGLPDLTKPFELFVDEKQGYAKGVLTQKLGPWRRPVAYLSKKLDPVAAGWPPCLRMVAAIAVLTKDAGKLTMGQPLNILAPHAVEALVKQPPDRWLSNARMTHYQALLLDTDRVQFGPVVALNPATLLPLPEEGLQHNCLDILAEAHGTRPDLTDQPLPDADHTWYTGGSSLLVEGQRKAGAAVTTETEVIWAKALPAGTSAQRAQLIALTQALKMAEGKKLNVYTNSRYAFATAHWHGEIYRRRGLLTSEGKEIKNKDEILALLKALFLPKRLSIIHCPGHQKGHSAEARGNRMADQAARKAAITETPDTSTLLIENSSPYTSEHF

SEQ ID NO: 323 - protein, 704 aa, synthetic construct
  REGION 1..20
MGSSHHHHHHSSGLVPRGSHMTLNIEDEHRLHETSKEPDVSLGSTWLSDFPQAWAETGGMGLAVRQAPLIIPLKATSTPVSIKQYPMSREARLGIKPHIRRLYDQGILVPCQSPWNTPLRPVKKPGTNDYRPVQDLREVNKRVEDIHPTVPNPYNLLSGLPPSHQWYTVLDLKDAFFCLRLHPTSQPLFAFEWEDPEMGISGQLTWTRLPQGFKNSPTLFDEALHRDLADFRIQHPDLILLQYVDDLLLAATSELDCQQGTRALLQTLGNLGYRASAKKAQICQKQVKYLGYLLKEGQRWITDARKETVMGQPTPKTPRELREFLGKAGFCRLWIPGFAEMAAPLYPLTKTGTLFNWGPDQQKAYQEIKQALLTAPALGLPDLTKPFELFVDEKQGYAKGVLTQKLGPWRRPVAYLSKKLDPVAAGWPPCLRMVAAIAVLTKDAGKLTMGQPLNILAPHAVEALVKQPPDRWLSNARMTHYQALLLDTDRVQFGPVVALNPATLLPLPEEGLQHNCLDILAEAHGTRPDLTDQPLPDADHTWYTGGSSLLQEGQRKAGAAVTTETEVIWAKALPAGTSAQRAQLIALTQALKMAEGKKLNVYTNSRYAFATAHWHGEIYRRRGLLTSEGKEIKNKDEILALLKALFLPKRLSIIHCPGHQKGHSAEARGNRMADQAARKAAITETPDTSTLLIENSSPYTSEHF

SEQ ID NO: 324 - protein, 704 aa, synthetic construct
  REGION 1..20
MGSSHHHHHHSSGLVPRGSHMTLNIEDEHALHETSKEPDVSLGSTWLSDFPQAWAETGGMGLAVRQAPLIIPLKATSTPVSIKQYPMSREARLGIKPHIRRLYDQGILVPCQSPWNTPLRPVKKPGTNDYRPVQDLREVNKRVEDIHPTVPNPYNLLSGLPPSHQWYTVLDLKDAFFCLRLHPTSQPLFAFEWRDPEMGISGQLTWTRLPQGFKNSPTLFDEALHRDLADFRIQHPDLILLQYVDDLLLAATSELDCQQGTRALLQTLGNLGYRASAKKAQICQKQVKYLGYLLKEGQRWITDARKETVMGQPTPKTPRELREFLGKAGFCRLWIPGFAEMAAPLYPLTKTGTLFNWGPDQQKAYQEIKQALLTAPALGLPDLTKPFELFVDEKQGYAKGVLTQKLGPWRRPVAYLSKKLDPVAAGWPPCLRMVAAIAVLTKDAGKLTMGQPLNILAPHAVEALVKQPPDRWLSNARMTHYQALLLDTDRVQFGPVVALNPATLLPLPEEGLQHNCLDILAEAHGTRPDLTDQPLPDADHTWYTGGSSLLQEGQRKAGAAVTTETEVIWAKALPAGTSAQRAQLIALTQALKMAEGKKLNVYTNSRYAFATAHWHGEIYRRRGLLTSEGKEIKNKDEILALLKALFLPKRLSIIHCPGHQKGHSAEARGNRMADQAARKAAITETPDTSTLLIENSSPYTSEHF

SEQ ID NO: 325 - protein, 704 aa, synthetic construct
  REGION 1..20
MGSSHHHHHHSSGLVPRGSHMTLNIEDEHLLHETSKEPDVSLGSTWLSDFPQAWAETGGMGLAVRQAPLIIPLKATSTPVSIKQYPMSREARLGIKPHIRRLYDQGILVPCQSPWNTPLRPVKKPGTNDYRPVQDLREVNKRVEDIHPTVPNPYNLLSGLPPSHQWYTVLDLKDAFFCLRLHPTSQPLFAFEWRDPEMGISGQLTWTRLPQGFKNSPTLFDEALHRDLADFRIQHPDLILLQYVDDLLLAATSELDCQQGTRALLQTLGNLGYRASAKKAQICQKQVKYLGYLLKEGQRWITDARKETVMGQPTPKTPRELREFLGKAGFCRLWIPGFAEMAAPLYPLTKTGTLFNWGPDQQKAYQEIKQALLTAPALGLPDLTKPFELFVDEKQGYAKGVLTQKLGPWRRPVAYLSKKLDPVAAGWPPCLRMVAAIAVLTKDAGKLTMGQPLNILAPHAVEALVKQPPDRWLSNARMTHYQALLLDTDRVQFGPVVALNPATLLPLPEEGLQHNCLDILAEAHGTRPDLTDQPLPDADHTWYTGGSSLLQEGQRKAGAAVTTETEVIWAKALPAGTSAQRAQLIALTQALKMAEGKKLNVYTNSRYAFATAHWHGEIYRRRGLLTSEGKEIKNKDEILALLKALFLPKRLSIIHCPGHQKGHSAEARGNRMADQAARKAAITETPDTSTLLIENSSPYTSEHF

SEQ ID NO: 326 - protein, 704 aa, synthetic construct
  REGION 1..20
MGSSHHHHHHSSGLVPRGSHMTLNIEDEHRLHETSKEPDVSLGSTWLSDFPQAWAETGGMGLAVRQAPLIIPLKATSTPVSIKQYPMSREARLGIKPHIRRLYDQGILVPCQSPWNTPLRPVKKPGTNDYRPVQDLREVNKRVEDIHPTVPNPYNLLFGLPPSHQWYTVLDLKDAFFCLRLHPTSQPLFAFEWRDPEMGISGQLTWTRLPQGFKNSPTLFDEALHRDLADFRIQHPDLILLQYVDDLLLAATSELDCQQGTRALLQTLGNLGYRASAKKAQICQKQVKYLGYLLKEGQRWITDARKETVMGQPTPKTPRELREFLGKAGFCRLWIPGFAEMAAPLYPLTKTGTLFNWGPDQQKAYQEIKQALLTAPALGLPDLTKPFELFVDEKQGYAKGVLTQKLGPWRRPVAYLSKKLDPVAAGWPPCLRMVAAIAVLTKDAGKLTMGQPLNILAPHAVEALVKQPPDRWLSNARMTHYQALLLDTDRVQFGPVVALNPATLLPLPEEGLQHNCLDILAEAHGTRPDLTDQPLPDADHTWYTGGSSLLQEGQRKAGAAVTTETEVIWAKALPAGTSAQRAQLIALTQALKMAEGKKLNVYTNSRYAFATAHWHGEIYRRRGLLTSEGKEIKNKDEILALLKALFLPKRLSIIHCPGHQKGHSAEARGNRMADQAARKAAITETPDTSTLLIENSSPYTSEHF

SEQ ID NO: 327 - protein, 704 aa, synthetic construct
  REGION 1..20
MGSSHHHHHHSSGLVPRGSHMTLNIEDEHRLHETSKEPDVSLGSTWLSDFPQAWAETGGMGLAVRQAPLIIPLKATSTPVSIKQYPMSREARLGIKPHIRRLYDQGILVPCQSPWNTPLRPVKKPGTNDYRPVQDLREVNKRVEDIHPTVPNPYNLLSGLPPSHQWYTVLDLKDAFFCLRLHPTSQPLFAFEWRDPEMGISGQLTWTRLPQGFKNSPTLFDEALHRDLADFRIQHPDLILLQYVDDLLLAATSELDCQQGTRALLQTLGNLGYRASAKKAQICQKQVKYLGYLLKEGQRWITDARKETVMGQPTPKTPRELREFLGKAGFCRLWIPGFAEMAAPLYPLTKTGTLFNWGPDQQKAYQEIKQALLTAPALGLPDLTKPFELFVDEKQGYAKGVLTQKLGPWRRPVAYLSKKLDPVAAGWPPCLRMVAAIAVLTKDAGKLCMGQPLNILAPHAVEALVKQPPDRWLSNARMTHYQALLLDTDRVQFGPVVALNPATLLPLPEEGLQHNCLDILAEAHGTRPDLTDQPLPDADHTWYTGGSSLLQEGQRKAGAAVTTETEVIWAKALPAGTSAQRAQLIALTQALKMAEGKKLNVYTNSRYAFATAHWHGEIYRRRGLLTSEGKEIKNKDEILALLKALFLPKRLSIIHCPGHQKGHSAEARGNRMADQAARKAAITETPDTSTLLIENSSPYTSEHF

SEQ ID NO: 328 - protein, 704 aa, synthetic construct
  REGION 1..20
MGSSHHHHHHSSGLVPRGSHMTLNIEDEHRLHETSKEPDVSLGSTWLSDFPQAWAETGGMGLAVRQAPLIIPLKATSTPVSIKQYPMSREARLGIKPHIRRLYDQGILVPCQSPWNTPLRPVKKPGTNDYRPVQDLREVNKRVEDIHPTVPNPYNLLSGLPPSHQWYTVLDLKDAFFCLRLHPTSQPLFAFEWRDPEMGISGQLTWTRLPQGFKNSPTLFDEALHRDLADFRIQHPDLILLQYVDDLLLAATSELDCQQGTRALLQTLGNLGYRASAKKAQICQKQVKYLGYLLKEGQRWITDARKETVMGQPTPKTPRELREFLGKAGFCRLWIPGFAEMAAPLYPLTKTGTLFNWGPDQQKAYQEIKQALLTAPALGLPDLTKPFELFVDEKQGYAKGVLTQKLGPWRRPVAYLSKKLDPVAAGWPPCLRMVAAIAVLTKDAGKLTMGQPLNILAPHAVEALVKQPPDRWLSNARMTHYQALLLDNDRVQFGPVVALNPATLLPLPEEGLQHNCLDILAEAHGTRPDLTDQPLPDADHTWYTGGSSLLQEGQRKAGAAVTTETEVIWAKALPAGTSAQRAQLIALTQALKMAEGKKLNVYTNSRYAFATAHWHGEIYRRRGLLTSEGKEIKNKDEILALLKALFLPKRLSIIHCPGHQKGHSAEARGNRMADQAARKAAITETPDTSTLLIENSSPYTSEHF

SEQ ID NO: 329 - protein, 704 aa, synthetic construct
  REGION 1..20
MGSSHHHHHHSSGLVPRGSHMTLNIEDEHRLHETSKEPDVSLGSTWLSDFPQAWAETGGMGLAVRQAPLIIPLKATSTPVSIKQYPMSREARLGIKPHIRRLYDQGILVPCQSPWNTPLRPVKKPGTNDYRPVQDLREVNKRVEDIHPTVPNPYNLLSGLPPSHQWYTVLDLKDAFFCLRLHPTSQPLFAFEWRDPEMGISGQLTWTRLPQGFKNSPTLFDEALHRDLADFRIQHPDLILLQYVDDLLLAATSELDCQQGTRALLQTLGNLGYRASAKKAQICQKQVKYLGYLLKEGQRWITDARKETVMGQPTPKTPRELREFLGKAGFCRLWIPGFAEMAAPLYPLTKTGTLFNWGPDQQKAYQEIKQALLTAPALGLPDLTKPFELFVDEKQGYAKGVLTQKLGPWRRPVAYLSKKLDPVAAGWPPCLRMVAAIAVLTKDAGKLTMGQPLNILAPHAVEALVKQPPDRWLSNARMTHYQALLLDTDRVQFGPVVALNPATLLPLPEEGLQHNCLDILAEAHGSRPDLTDQPLPDADHTWYTGGSSLLQEGQRKAGAAVTTETEVIWAKALPAGTSAQRAQLIALTQALKMAEGKKLNVYTNSRYAFATAHWHGEIYRRRGLLTSEGKEIKNKDEILALLKALFLPKRLSIIHCPGHQKGHSAEARGNRMADQAARKAAITETPDTSTLLIENSSPYTSEHF

SEQ ID NO: 330 - protein, 704 aa, synthetic construct
  REGION 1..20
MGSSHHHHHHSSGLVPRGSHMTLNIEDEHRLHETSKEPDVSLGSTWLSDFPQAWAETGGMGLAVRQAPLIIPLKATSTPVSIKQYPMSREARLGIKPHIRRLYDQGILVPCQSPWNTPLRPVKKPGTNDYRPVQDLREVNKRVEDIHPTYPNPYNLLSGLPPSHQWYTVLDLKDAFFCLRLHPTSQPLFAFEWRDPEMGISGQLTWTRLPQGFKNSPTLFDEALHRDLADFRIQHPDLILLQYVDDLLLAATSELDCQQGTRALLQTLGNLGYRASAKKAQICQKQVKYLGYLLKEGQRWITDARKETVMGQPTPKTPRELREFLGKAGFCRLWIPGFAEMAAPLYPLTKTGTLFNWGPDQQKAYQEIKQALLTAPALGLPDLTKPFELFVDEKQGYAKGVLTQKLGPWRRPVAYLSKKLDPVAAGWPPCLRMVAAIAVLTKDAGKLTMGQPLNILAPHAVEALVKQPPDRWLSNARMTHYQALLLDTDRVQFGPVVALNPATLLPLPEEGLQHNCLDILAEAHGTRPDLTDQPLPDADHTWYTGGSSLLQEGQRKAGAAVTTETEVIWAKALPAGTSAQRAQLIALTQALKMAEGKKLNVYTNSRYAFATAHWHGEIYRRRGLLTSEGKEIKNKDEILALLKALFLPKRLSIIHCPGHQKGHSAEARGNRMADQAARKAAITETPDTSTLLIENSSPYTSEHF

SEQ ID NO: 331 - protein, 704 aa, synthetic construct
  REGION 1..20
MGSSHHHHHHSSGLVPRGSHMTLNIEDEHRLHETSKEPDVSLGSTWLSDFPQAWAETGGMGLAVRQAPLIIPLKATSTPVSIKQYPMSREARLGIKPHIRRLYDQGILVPCQSPWNTPLRPVKKPGTNDYRPVQDLREVNKRVEDIHPTVPNPYNLLSGLPPSHQWYTVLDLKDAFFCLRLHPTSQPLFAFEWRDPEMGISGQLTWTRLPQGFKNSPTLFDEALHRDLADFRIQHPDLILLQYVDDLLLAATSELDCQQGTRALLQTLGNLGYRASAKKAQICQKQVKYLGYLLKEGQRWITDARKETVMGQPTPKTPRELREFLGKAGFCRLWIPGFAEMAAPLYPLTKTGTLFNWGPDQQKAYQEIKQALLTAPALGLPDLTKPFELFSDEKQGYAKGVLTQKLGPWRRPVAYLSKKLDPVAAGWPPCLRMVAAIAVLTKDAGKLTMGQPLNILAPHAVEALVKQPPDRWLSNARMTHYQALLLDTDRVQFGPVVALNPATLLPLPEEGLQHNCLDILAEAHGTRPDLTDQPLPDADHTWYTGGSSLLQEGQRKAGAAVTTETEVIWAKALPAGTSAQRAQLIALTQALKMAEGKKLNVYTNSRYAFATAHWHGEIYRRRGLLTSEGKEIKNKDEILALLKALFLPKRLSIIHCPGHQKGHSAEARGNRMADQAARKAAITETPDTSTLLIENSSPYTSEHF

SEQ ID NO: 332 - protein, 704 aa, synthetic construct
  REGION 1..20
MGSSHHHHHHSSGLVPRGSHMTLNIEDEHRLHETSKEPDVSLGSTWLSDFPQAWAETGGMGLAVRQAPLIIPLKATSTPVSIKQYPMSREARLGIKPHIRRLYDQGILVPCQSPWNTPLRPVKKPGTNDYRPVQDLREVNKRVEDIHPTVPNPYNLLSGLPPSHQWYTVLDLKDAFFCLRLHPTSQPLFAFEWRDPEMGISGQLTWTRLPQGFKNSPTLFDEALHRDLADFRIQHPDLILLQYVDDLLLAATSELDCQQGTRALLQTLGNLGYRASAKKAQICQKQVKYLGYLLKEGQRWITDARKETVMGQPTPKTPRELREFLGKAGFCRLWIPGFAEMAAPLYPLTKTGTLFNWGPDQQKAYQEIKQALLTAPALGLPDLTKPFELFVDEKQGYAKGSLTQKLGPWRRPVAYLSKKLDPVAAGWPPCLRMVAAIAVLTKDAGKLTMGQPLNILAPHAVEALVKQPPDRWLSNARMTHYQALLLDTDRVQFGPVVALNPATLLPLPEEGLQHNCLDILAEAHGTRPDLTDQPLPDADHTWYTGGSSLLQEGQRKAGAAVTTETEVIWAKALPAGTSAQRAQLIALTQALKMAEGKKLNVYTNSRYAFATAHWHGEIYRRRGLLTSEGKEIKNKDEILALLKALFLPKRLSIIHCPGHQKGHSAEARGNRMADQAARKAAITETPDTSTLLIENSSPYTSEHF

SEQ ID NO: 333 - protein, 704 aa, synthetic construct
  REGION 1..20
MGSSHHHHHHSSGLVPRGSHMTLNIEDEHRLHETSKEPDVSLGSTWLSDFPQAWAETGGMGLAVRQAPLIIPLKATSTPVSIKQYPMSREARLGIKPHIRRLYDQGILVPCQSPWNTPLRPVKKPGTNDYRPVQDLREVNKRVEDIHPTVPNPYNLLSGLPPSHQWYTVLDLKDAFFCLRLHPTSQPLFAFEWRDPEMGISGQLTWTRLPQGFKNSPTLFDEALHRDLADFRIQHPDLILLQYVDDLLLAATSELDCQQGTRALLQTLGNLGYRASAKKAQICQKQVKYLGYLLKEGQRWITDARKETVMGQPTPKTPRELREFLGKAGFCRLWIPGFAEMAAPLYPLTKTGTLFNWGPDQQKAYQEIKQALLTAPALGLPDLTKPFELFVDEKQGIAKGVLTQKLGPWRRPVAYLSKKLDPVAAGWPPCLRMVAAIAVLTKDAGKLTMGQPLNILAPHAVEALVKQPPDRWLSNARMTHYQALLLDTDRVQFGPVVALNPATLLPLPEEGLQHNCLDILAEAHGTRPDLTDQPLPDADHTWYTGGSSLLQEGQRKAGAAVTTETEVIWAKALPAGTSAQRAQLIALTQALKMAEGKKLNVYTNSRYAFATAHWHGEIYRRRGLLTSEGKEIKNKDEILALLKALFLPKRLSIIHCPGHQKGHSAEARGNRMADQAARKAAITETPDTSTLLIENSSPYTSEHF

SEQ ID NO: 334 - protein, 704 aa, synthetic construct
  REGION 1..20
MGSSHHHHHHSSGLVPRGSHMTLNIEDEHRLHETSKEPDVSLGSTWLSDFPQAWAETGGMGLAVRQAPLIIPLKATSTPVSIKQYPMSREARLGIKPHIRRLYDQGILVPCQSPWNTPLRPVKKPGTNDYRPVQDLREVNKRVEDIHPTVPNPYNLLSGLPPSHQWYTVLDLKDAFFCLRLHPTSQPLFAFEWRDPEMGISGQLTWTRLPQGFKNSPTLFDEALHRDLADFRIQHPDLILLQYVDDLLLAATSELDCQQGTRALLQTLGNLGYRASAKKAQICQKQVKYLGYLLKEGQRWITDARKETVMGQPTPKTPRELREFLGKAGFCRLWIPGFAEMAAPLYPLTKTGTLFNWGPDQQKAYQEIKQALLTAPALGLPDLTKPFELFVDEKQGYAKGVLTQKLGPWRRPVAYLSKKLDPVAAGWPPCLRMVAAIAVLTKDAGKLTMGQPLNILAPHAVEALVKQPPDRWLSNARMTHYQALLLDTDRVQFGPVVYLNPATLLPLPEEGLQHNCLDILAEAHGTRPDLTDQPLPDADHTWYTGGSSLLQEGQRKAGAAVTTETEVIWAKALPAGTSAQRAQLIALTQALKMAEGKKLNVYTNSRYAFATAHWHGEIYRRRGLLTSEGKEIKNKDEILALLKALFLPKRLSIIHCPGHQKGHSAEARGNRMADQAARKAAITETPDTSTLLIENSSPYTSEHF

SEQ ID NO: 335 - protein, 704 aa, synthetic construct
  REGION 1..20
MGSSHHHHHHSSGLVPRGSHMTLNIEDEHRLHETSKEPDVSLGSTWLSDFPQAWAETGGMGLAVRQAPLIIPLKATSTPVSIKQYPMSREARLGIKPHIRRLYDQGILVPCQSPWNTPLRPVKKPGTNDYRPVQDLREVNKRVEDIHPTVPNPYNLLSGLPPSHQWYTVLDLKDAFFCLRLHPTSQPLFAFEWRDPEMGISGQLTWTRLPQGFKNSPTLFDEALHRDLADFRIQHPDLILLQYVDDLLLAATSELDCQQGTRALLQTLGNLGYRASAKKAQICQKQVKYLGYLLKEGQRWITDARKETVMGQPTPKTPRELREFLGKAGFCRLWIPGFAEMAAPLYPLTKTGTLFNWGPDQQKAYQEIKQALLTAPALGLPDLTKPFELFVDEKQGYAKGVLTQKLGPWRRPVAYLSKKLDPVAAGWPPCLRMVAAIAVLTKDAGKLTMGQPLNILAPHAVEALVKQPPDRWLSNARMTHYQALLLDTDRVQFGPVVALNPATLLPLPEEGLQHNCLDILAEAHGTRPDLTDQPLPDADHTWYTGGSSLLQEGQRKAGAAVTTETEVIWAKALPAGTSAQRAQLIALTQALKMAEGKKLNVYTNSRYTFATAHWHGEIYRRRGLLTSEGKEIKNKDEILALLKALFLPKRLSIIHCPGHQKGHSAEARGNRMADQAARKAAITETPDTSTLLIENSSPYTSEHF

SEQ ID NO: 336 - protein, 704 aa, synthetic construct
  REGION 1..20
MGSSHHHHHHSSGLVPRGSHMTLNIEDEHRLHETSKEPDVSLGSTWLSDFPQAWAETGGMGLAVRQAPLIIPLKATSTPVSIKQYPMSREARLGIKPHIRRLYDQGILVPCQSPWNTPLRPVKKPGTNDYRPVQDLREVNKRVEDIHPTVPNPYNLLSGLPPSHQWYTVLDLKDAFFCLRLHPTSQPLFAFEWRDPEMGISGQLTWTRLPQGFKNSPTLFDEALHRDLADFRIQHPDLILLQYVDDLLLAATSELDCQQGTRALLQTLGNLGYRASAKKAQICQKQVKYLGYLLKEGQRWITDARKETVMGQPTPKTPRELREFLGKAGFCRLWIPGFAEMAAPLYPLTKTGTLFNWGPDQQKAYQEIKQALLTAPALGLPDLTKPFELFVDEKQGYAKGVLTQKLGPWRRPVAYLSKKLDPVAAGWPPCLRMVAAIAVLTKDAGKLTMGQPLNILAPHAVEALVKQPPDRWLSNARMTHYQALLLDTDRVQFGPVVALNPATLLPLPEEGLQHNCLDILAEAHGTRPDLTDQPLPDADHTWYTNGSSLLQEGQRKAGAAVTTETEVIWAKALPAGTSAQRAQLIALTQALKMAEGKKLNVYTNSRYAFATAHWHGEIYRRRGLLTSEGKEIKNKDEILALLKALFLPKRLSIIHCPGHQKGHSAEARGNRMADQAARKAAITETPDTSTLLIENSSPYTSEHF

SEQ ID NO: 337 - protein, 704 aa, synthetic construct
  REGION 1..20
MGSSHHHHHHSSGLVPRGSHMTLNIEDEHRLHETSKEPDVSLGSTWLSDFPQAWAETGGMGLAVRQAPLIIPLKATSTPVSIKQYPMSREARLGIKPHIRRLYDQGILVPCQSPWNTPLRPVKKPGTNDYRPVQDLREVNKRVEDIHPTVPNPYNLLSGLPPSHQWYTVLDLKDAFFCLRLHPTSQPLFAFEWRDPEMGISGQLTWTRLPQGFKNSPTLFDEALHRDLADFRIQHPDLILLQYVDDLLLAATSELDCQQGTRALLQTLGNLGYRASAKKAQICQKQVKYLGYLLKEGQRWITDARKETVMGQPTPKTPRELREFLGKAGFCRLWIPGFAEMAAPLYPLTKTGTLFNWGPDQQKAYQEIKQALLTAPALGLPDLTKPFELFVDEKQGYAKGVLTQKLGPWRRPVAYLSKKLDPVAAGWPPCLRMVAAIAVLTKDAGKLTMGQPLNILAPHAVEALVKQPPDRWLSNARMTHYQALLLDTDRVQFGSVVALNPATLLPLPEEGLQHNCLDILAEAHGTRPDLTDQPLPDADHTWYTGGSSLLQEGQRKAGAAVTTETEVIWAKALPAGTSAQRAQLIALTQALKMAEGKKLNVYTNSRYAFATAHWHGEIYRRRGLLTSEGKEIKNKDEILALLKALFLPKRLSIIHCPGHQKGHSAEARGNRMADQAARKAAITETPDTSTLLIENSSPYTSEHF

SEQ ID NO: 338 - protein, 704 aa, synthetic construct
  REGION 1..20
MGSSHHHHHHSSGLVPRGSHMTLNIEDEHRLHETSKEPDVSLGSTWLSDFPQAWAETGGMGLAVRQAPLIIPLKATSTPVSIKQYPMSREARLGIKPHIRRLYDQGILVPCQSPWNTPLRPVKKPGTNDYRPVQDLREVNKRVEDIHPTVPNPYNLLSGLPPSHQWYTVLDLKDAFFCLRLHPTSQPLFAFEWRDPEMGISGQLTWTRLPQGFKNSPTLFDEALHRDLADFRIQHPDLILLQYVDDLLLAATSELDCQQGTRALLQTLGNLGYRASAKKAQICQKQVKYLGYLLKEGQRWITDARKETVMGQPTPKTPRELREFLGKAGFCRLWIPGFAEMAAPLYPLTKTGTLFNWGPDQQKAYQEIKQALLTAPALGLPDLTKPFELFVDEKQGYAKGVLTQKLGPWRRPVAYLSKKLDPVAAGWPPCLRMVAAIAVLTKDAGKLTMGQPLNILAPHAVEALVKQPPDRWLSNARMTHYQALLLDTDRVQFGPVVALNPATLLPLPEEGLQHNCLDILAEAHGTRPDLTDQPLPDADHTWYLGGSSLLQEGQRKAGAAVTTETEVIWAKALPAGTSAQRAQLIALTQALKMAEGKKLNVYTNSRYAFATAHWHGEIYRRRGLLTSEGKEIKNKDEILALLKALFLPKRLSIIHCPGHQKGHSAEARGNRMADQAARKAAITETPDTSTLLIENSSPYTSEHF

SEQ ID NO: 339 - protein, 704 aa, synthetic construct
  REGION 1..20
MGSSHHHHHHSSGLVPRGSHMTLNIEDEHRLHETSKEPDVSLGSTWLSDFPQAWAETGGMGLAVRQAPLIIPLKATSTPVSIKQYPMSREARLGIKPHIRRLYDQGILVPCQSPWNTPLRPVKKPGTNDYRPVQDLREVNKRVEDIHPTVPNPYNLLSGLPPSHQWYTVLDLKDAFFCLRLHPTSQPLFAFEWRDPEMGISGQLTWTRLPQGFKNSPTLFDEALHRDLADFRIQHPDLILLQYVDDLLLAATSELDCQQGTRALLQTLGNLGYRASAKKAQICQKQVKYLGYLLKEGQRWITDARKETVMGQPTPKTPRELREFLGKAGFCRLWIPGFAEMAAPLYPLTKTGTLFNWGPDQQKAYQEIKQALLTAPALGLPDLTKPFELFVDEKQGYAKGVLTQKLGPWRRPVAYLSKKLDPVAAGWPPCLRMVAAIAVLTKDAGKLTMGQPLNILAPHAVEALVKQPPDRWLSNARMTHYQALLLDTDRVQFGPVVALNPATLLPLPEEGLQHNCLDILAEAHGTRPDLTDQPLPDADHTWYTGGSSLLQEGQRKAGAAVTTETEVIWAKALPAGTSAQRAQLIALTQALKMAEGKKLNVYTNSRYAFATAHLHGEIYRRRGLLTSEGKEIKNKDEILALLKALFLPKRLSIIHCPGHQKGHSAEARGNRMADQAARKAAITETPDTSTLLIENSSPYTSEHF

SEQ ID NO: 340 - protein, 704 aa, synthetic construct
  REGION 1..20
MGSSHHHHHHSSGLVPRGSHMTLNIEDEHRLHETSKEPDVSLGSTWLSDFPQAWAETGGMGLAVRQAPLIIPLKATSTPVSIKQYPMSREARLGIKPHIRRLYDQGILVPCQSPWNTPLRPVKKPGTNDYRPVQDLREVNKRVEDIHPTVPNPYNLLSGLPPSHQWYTVLDLKDAFFCLRLHPTSQPLFAFEWRDPEMGISGQLTWTRLPQGFKNSPTLFDEALHRDLADFRIQHPDLILLQYVDDLLLAATSELDCQQGTRALLQTLGNLGYRASAKKAQICQKQVKYLGYLLKEGQRWITDARKETVMGQPTPKTPRELREFLGKAGFCRLWIPGFAEMAAPLYPLTKTGTLFNWGPDQQKAYQEIKQALLTAPALGLPDLTKPFELFVDEKQGYAKGVLTQKLGPWRRPVAYLSKKLDPVAAGWPPCLRMVAAIAVLTKDAGKLTMGQPLNILAPHAVEALVKQPPDRWLSNARMTHYQALLLDTDRVQFGPVVALNPATLLPLPEEGLQHNCLDILQEAHGTRPDLTDQPLPDADHTWYTGGSSLLQEGQRKAGAAVTTETEVIWAKALPAGTSAQRAQLIALTQALKMAEGKKLNVYTNSRYAFATAHWHGEIYRRRGLLTSEGKEIKNKDEILALLKALFLPKRLSIIHCPGHQKGHSAEARGNRMADQAARKAAITETPDTSTLLIENSSPYTSEHF

SEQ ID NO: 341 - protein, 704 aa, synthetic construct
  REGION 1..20
MGSSHHHHHHSSGLVPRGSHMTLNIEDEHRLHETSKEPDVSLGSTWLSDFPQAWAETGGMGLAVRQAPLIIPLKATSTPVSIKQYPMSREARLGIKPHIRRLYDQGILVPCQSPWNTPLRPVKKPGTNDYRPVQDLREVNKRVEDIHPTVPNPYNLLSGLPPSHQWYTVLDLKDAFFCLRLHPTSQPLFAFEWRDPEMGISGQLTWTRLPQGFKNSPTLFDEALHRDLADFRIQHPDLILLQYVDDLLLAATSELDCQQGTRALLQTLGNLGYRASAKKAQICQKQVKYLGYLLKEGQRWITDARKETVMGQPTPKTPRELREFLGKAGFCRLWIPGFAEMAAPLYPLTKTGTLFNWGPDQQKAYQEIKQALLTAPALGLPDLTKPFELFVDEKQGYAKGVLTQKLGPWRRPVAYLSKKLDPVAAGWPPCLRMVAAIAVLTKDAGKLTMGQPLNILAPHAVEALVKQPPDRWLSNARMTHYQALLLDTDRVQFGPVVALNPATLLPLPEEGLQHNCLDILAEAHGTRPDLTDQPLPDADHTWYTGGSSLLQEGQRKAGAAVTTETEVIWAKALPAGTSAQRAQLIALTQALKMAEGKKLNVYTNSRYAFATAHWHGEIYRRRGLLTSEGKEIKNKDEILRLLKALFLPKRLSIIHCPGHQKGHSAEARGNRMADQAARKAAITETPDTSTLLIENSSPYTSEHF

SEQ ID NO: 342 - protein, 704 aa, synthetic construct
  REGION 1..20
MGSSHHHHHHSSGLVPRGSHMTLNIEDEHRLHETSKEPDVSLGSTWLSDFPQAWAETGGMGLAVRQAPLIIPLKATSTPVSIKQYPMSREARLGIKPHIRRLYDQGILVPCQSPWNTPLRPVKKPGTNDYRPVQDLREVNKRVEDIHPTVPNPYNLLSGLPPSHQWYTVLDLKDAFFCLRLHPTSQPLFAFEWRDPEMGISGQLTWTRLPQGFKNSPTLFDEALHRDLADFRIQHPDLILLQYVDDLLLAATSELDCQQGTRALLQTLGNLGYRASAKKAQICQKQVKYLGYLLKEGQRWITDARKETVMGQPTPKTPRELREFLGKAGFCRLWIPGFAEMAAPLYPLTKTGTLFNWGPDQQKAYQEIKQALLTAPALGLPDLTKPFELFVDEKQGYAKGVLTQKLGPWRRPVAYLSKKLDPVAAGWPPCLRMVAAIAVLTKDAGKLTMGQPLNILAPHAVEALVKQPPDRWLSNARMTHYQALLLDTDRVQFGPVVALNPATLLPLPEEGLQHNCLDILAEAHGTRPDLTDQPLPDADHTWYTGGSSLLQEGQRKAGAAVTTETEVIWAKALPAGTSAQRAQLIALTQALKMAEGKKLNVYTNSRYAFATAHWHGEIYRRRGLLTSEGKEIKNKDEILALLKALFLPKTLSIIHCPGHQKGHSAEARGNRMADQAARKAAITETPDTSTLLIENSSPYTSEHF

SEQ ID NO: 343 - protein, 704 aa, synthetic construct
  REGION 1..20
MGSSHHHHHHSSGLVPRGSHMTLNIEDEHALHETSKEPDVSLGSTWLSDFPQAWAETGGMGLAVRQAPLIIPLKATSTPVSIKQYPMSREARLGIKPHIRRLYDQGILVPCQSPWNTPLRPVKKPGTNDYRPVQDLREVNKRVEDIHPTVPNPYNLLSGLPPSHQWYTVLDLKDAFFALRLHPTSQPLFAFEWRDPEMGISGQLTWTRLPQGFKNSPTLFDEALHRDLADFRIQHPDLILLQYVDDLLLAATSELDCQQGTRALLQTLGNLGYRASAKKAQICQKQVKYLGYLLKEGQRWITDARKETVMGQPTPKTPRELREFLGKAGFCRLWIPGFAEMAAPLYPLTKTGTLFNWGPDQQKAYQEIKQALLTAPALGLPDLTKPFELFVDEKQGYAKGVLTQKLGPWRRPVAYLSKKLDPVAAGWPPCLRMVAAIAVLTKDAGKLTMGQPLNILAPHAVEALVKQPPDRWLSNARMTHYQALLLDTDRVQFGPVVALNPATLLPLPEEGLQHNCLDILAEAHGTRPDLTDQPLPDADHTWYTGGSSLLQEGQRKAGAAVTTETEVIWAKALPAGTSAQRAQLIALTQALKMAEGKKLNVYTNSRYAFATAHWHGEIYRRRGLLTSEGKEIKNKDEILALLKALFLPKRLSIIHCPGHQKGHSAEARGNRMADQAARKAAITETPDTSTLLIENSSPYTSEHF

SEQ ID NO: 344 - protein, 704 aa, synthetic construct
  REGION 1..20
MGSSHHHHHHSSGLVPRGSHMTLNIEDEHRLHETSKEPDVSLGSTWLSDFPQAWAETGGMGLAVRQAPLIIPLKATSTPVSIKQYPMSREARLGIKPHIRRLYDQGILVPCQSPWNTPLRPVKKPGTNDYRPVQDLREVNKRVEDIHPTVPNPYNLLSGLPPSHQWYTVLDLKDAFFALPLHPTSQPLFAFEWRDPEMGISGQLTWTRLPQGFKNSPTLFDEALHRDLADFRIQHPDLILLQYVDDLLLAATSELDCQQGTRALLQTLGNLGYRASAKKAQICQKQVKYLGYLLKEGQRWITDARKETVMGQPTPKTPRELREFLGKAGFCRLWIPGFAEMAAPLYPLTKTGTLFNWGPDQQKAYQEIKQALLTAPALGLPDLTKPFELFVDEKQGYAKGVLTQKLGPWRRPVAYLSKKLDPVAAGWPPCLRMVAAIAVLTKDAGKLTMGQPLNILAPHAVEALVKQPPDRWLSNARMTHYQALLLDTDRVQFGPVVALNPATLLPLPEEGLQHNCLDILAEAHGTRPDLTDQPLPDADHTWYTGGSSLLQEGQRKAGAAVTTETEVIWAKALPAGTSAQRAQLIALTQALKMAEGKKLNVYTNSRYAFATAHWHGEIYRRRGLLTSEGKEIKNKDEILALLKALFLPKRLSIIHCPGHQKGHSAEARGNRMADQAARKAAITETPDTSTLLIENSSPYTSEHF

SEQ ID NO: 345 - protein, 704 aa, synthetic construct
  REGION 1..20
MGSSHHHHHHSSGLVPRGSHMTLNIEDEHRLHETSKEPDVSLGSTWLSDFPQAWAETGGMGLAVRQAPLIIPLKATSTPVSIKQYPMSREARLGIKPHIRRLYDQGILVPCQSPWNTPLRPVKKPGTNDYRPVQDLREVNKRVEDIHPTVPNPYNLLSGLPPSHQWYTVLDLKDAFFALSLHPTSQPLFAFEWRDPEMGISGQLTWTRLPQGFKNSPTLFDEALHRDLADFRIQHPDLILLQYVDDLLLAATSELDCQQGTRALLQTLGNLGYRASAKKAQICQKQVKYLGYLLKEGQRWITDARKETVMGQPTPKTPRELREFLGKAGFCRLWIPGFAEMAAPLYPLTKTGTLFNWGPDQQKAYQEIKQALLTAPALGLPDLTKPFELFVDEKQGYAKGVLTQKLGPWRRPVAYLSKKLDPVAAGWPPCLRMVAAIAVLTKDAGKLTMGQPLNILAPHAVEALVKQPPDRWLSNARMTHYQALLLDTDRVQFGPVVALNPATLLPLPEEGLQHNCLDILAEAHGTRPDLTDQPLPDADHTWYTGGSSLLQEGQRKAGAAVTTETEVIWAKALPAGTSAQRAQLIALTQALKMAEGKKLNVYTNSRYAFATAHWHGEIYRRRGLLTSEGKEIKNKDEILALLKALFLPKRLSIIHCPGHQKGHSAEARGNRMADQAARKAAITETPDTSTLLIENSSPYTSEHF

SEQ ID NO: 346 - protein, 704 aa, synthetic construct
  REGION 1..20
MGSSHHHHHHSSGLVPRGSHMTLNIEDEHRLHETSKEPDVSLGSTWLSDFPQAWAETGGMGLAVRQAPLIIPLKATSTPVSIKQYPMSREARLGIKPHIRRLYDQGILVPCQSPWNTPLRPVKKPGTNDYRPVQDLREVNKRVEDIHPTVPNPYNLLSGLPPSHQWYTVLDLKDAFFALRLHPTSQPLFAFEWEDPEMGISGQLTWTRLPQGFKNSPTLFDEALHRDLADFRIQHPDLILLQYVDDLLLAATSELDCQQGTRALLQTLGNLGYRASAKKAQICQKQVKYLGYLLKEGQRWITDARKETVMGQPTPKTPRELREFLGKAGFCRLWIPGFAEMAAPLYPLTKTGTLFNWGPDQQKAYQEIKQALLTAPALGLPDLTKPFELFVDEKQGYAKGVLTQKLGPWRRPVAYLSKKLDPVAAGWPPCLRMVAAIAVLTKDAGKLTMGQPLNILAPHAVEALVKQPPDRWLSNARMTHYQALLLDTDRVQFGPVVALNPATLLPLPEEGLQHNCLDILAEAHGTRPDLTDQPLPDADHTWYTGGSSLLQEGQRKAGAAVTTETEVIWAKALPAGTSAQRAQLIALTQALKMAEGKKLNVYTNSRYAFATAHWHGEIYRRRGLLTSEGKEIKNKDEILALLKALFLPKRLSIIHCPGHQKGHSAEARGNRMADQAARKAAITETPDTSTLLIENSSPYTSEHF

SEQ ID NO: 347 - protein, 704 aa, synthetic construct
  REGION 1..20
MGSSHHHHHHSSGLVPRGSHMTLNIEDEHRLHETSKEPDVSLGSTWLSDFPQAWAETGGMGLAVRQAPLIIPLKATSTPVSIKQYPMSREARLGIKPHIRRLYDQGILVPCQSPWNTPLRPVKKPGTNDYRPVQDLREVNKRVEDIHPTVPNPYNLLSGLPPSHQWYTVLDLKDAFFALRLHPTSQPLFAFEWRDPEMGISGQLTWTRLPQGFKNSPTLFDEALHRDLADFRIQHPDLILLQYVDDLLLAATSELDCQQGTRALLQTLGNLGYRASAKKAQICQKQVKYLGYLLKEGQRWITDARKEDVMGQPTPKTPRELREFLGKAGFCRLWIPGFAEMAAPLYPLTKTGTLFNWGPDQQKAYQEIKQALLTAPALGLPDLTKPFELFVDEKQGYAKGVLTQKLGPWRRPVAYLSKKLDPVAAGWPPCLRMVAAIAVLTKDAGKLTMGQPLNILAPHAVEALVKQPPDRWLSNARMTHYQALLLDTDRVQFGPVVALNPATLLPLPEEGLQHNCLDILAEAHGTRPDLTDQPLPDADHTWYTGGSSLLQEGQRKAGAAVTTETEVIWAKALPAGTSAQRAQLIALTQALKMAEGKKLNVYTNSRYAFATAHWHGEIYRRRGLLTSEGKEIKNKDEILALLKALFLPKRLSIIHCPGHQKGHSAEARGNRMADQAARKAAITETPDTSTLLIENSSPYTSEHF

SEQ ID NO: 348 - protein, 704 aa, synthetic construct
  REGION 1..20
MGSSHHHHHHSSGLVPRGSHMTLNIEDEHRLHETSKEPDVSLGSTWLSDFPQAWAETGGMGLAVRQAPLIIPLKATSTPVSIKQYPMSREARLGIKPHIRRLYDQGILVPCQSPWNTPLRPVKKPGTNDYRPVQDLREVNKRVEDIHPTVPNPYNLLSGLPPSHQWYTVLDLKDAFFALRLHPTSQPLFAFEWRDPEMGISGQLTWTRLPQGFKNSPTLFDEALHRDLADFRIQHPDLILLQYVDDLLLAATSELDCQQGTRALLQTLGNLGYRASAKKAQICQKQVKYLGYLLKEGQRWITDARKETVMGQPTPKTPRELREFLGKAGFCRLWIPGFAEMAAPLYPLTKTGTEFNWGPDQQKAYQEIKQALLTAPALGLPDLTKPFELFVDEKQGYAKGVLTQKLGPWRRPVAYLSKKLDPVAAGWPPCLRMVAAIAVLTKDAGKLTMGQPLNILAPHAVEALVKQPPDRWLSNARMTHYQALLLDTDRVQFGPVVALNPATLLPLPEEGLQHNCLDILAEAHGTRPDLTDQPLPDADHTWYTGGSSLLQEGQRKAGAAVTTETEVIWAKALPAGTSAQRAQLIALTQALKMAEGKKLNVYTNSRYAFATAHWHGEIYRRRGLLTSEGKEIKNKDEILALLKALFLPKRLSIIHCPGHQKGHSAEARGNRMADQAARKAAITETPDTSTLLIENSSPYTSEHF

SEQ ID NO: 349 - protein, 704 aa, synthetic construct
  REGION 1..20
MGSSHHHHHHSSGLVPRGSHMTLNIEDEHRLHETSKEPDVSLGSTWLSDFPQAWAETGGMGLAVRQAPLIIPLKATSTPVSIKQYPMSREARLGIKPHIRRLYDQGILVPCQSPWNTPLRPVKKPGTNDYRPVQDLREVNKRVEDIHPTVPNPYNLLSGLPPSHQWYTVLDLKDAFFALRLHPTSQPLFAFEWRDPEMGISGQLTWTRLPQGFKNSPTLFDEALHRDLADFRIQHPDLILLQYVDDLLLAATSELDCQQGTRALLQTLGNLGYRASAKKAQICQKQVKYLGYLLKEGQRWITDARKETVMGQPTPKTPRELREFLGKAGFCRLWIPGFAEMAAPLYPLTKTGTLFNWGPDQQKAYQEIKQALLTAPALGLPDLTKPFELFVDEKQGYAKGVLTQKLGPWRRPVAYLSKKLDPVAAGWPPCLRMVAAIAVLTKDAGKLTMGQPLTILAPHAVEALVKQPPDRWLSNARMTHYQALLLDTDRVQFGPVVALNPATLLPLPEEGLQHNCLDILAEAHGTRPDLTDQPLPDADHTWYTGGSSLLQEGQRKAGAAVTTETEVIWAKALPAGTSAQRAQLIALTQALKMAEGKKLNVYTNSRYAFATAHWHGEIYRRRGLLTSEGKEIKNKDEILALLKALFLPKRLSIIHCPGHQKGHSAEARGNRMADQAARKAAITETPDTSTLLIENSSPYTSEHF

SEQ ID NO: 350 - protein, 704 aa, synthetic construct
  REGION 1..20
MGSSHHHHHHSSGLVPRGSHMTLNIEDEHRLHETSKEPDVSLGSTWLSDFPQAWAETGGMGLAVRQAPLIIPLKATSTPVSIKQYPMSREARLGIKPHIRRLYDQGILVPCQSPWNTPLRPVKKPGTNDYRPVQDLREVNKRVEDIHPTVPNPYNLLSGLPPSHQWYTVLDLKDAFFALRLHPTSQPLFAFEWRDPEMGISGQLTWTRLPQGFKNSPTLFDEALHRDLADFRIQHPDLILLQYVDDLLLAATSELDCQQGTRALLQTLGNLGYRASAKKAQICQKQVKYLGYLLKEGQRWITDARKETVMGQPTPKTPRELREFLGKAGFCRLWIPGFAEMAAPLYPLTKTGTLFNWGPDQQKAYQEIKQALLTAPALGLPDLTKPFELFVDEKQGYAKGVLTQKLGPWRRPVAYLSKKLDPVAAGWPPCLRMVAAIAVLTKDAGKLTMGQPLNIHAPHAVEALVKQPPDRWLSNARMTHYQALLLDTDRVQFGPVVALNPATLLPLPEEGLQHNCLDILAEAHGTRPDLTDQPLPDADHTWYTGGSSLLQEGQRKAGAAVTTETEVIWAKALPAGTSAQRAQLIALTQALKMAEGKKLNVYTNSRYAFATAHWHGEIYRRRGLLTSEGKEIKNKDEILALLKALFLPKRLSIIHCPGHQKGHSAEARGNRMADQAARKAAITETPDTSTLLIENSSPYTSEHF

SEQ ID NO: 351 - protein, 704 aa, synthetic construct
  REGION 1..20
MGSSHHHHHHSSGLVPRGSHMTLNIEDEHRLHETSKEPDVSLGSTWLSDFPQAWAETGGMGLAVRQAPLIIPLKATSTPVSIKQYPMSREARLGIKPHIRRLYDQGILVPCQSPWNTPLRPVKKPGTNDYRPVQDLREVNKRVEDIHPTVPNPYNLLSGLPPSHQWYTVLDLKDAFFALRLHPTSQPLFAFEWRDPEMGISGQLTWTRLPQGFKNSPTLFDEALHRDLADFRIQHPDLILLQYVDDLLLAATSELDCQQGTRALLQTLGNLGYRASAKKAQICQKQVKYLGYLLKEGQRWITDARKETVMGQPTPKTPRELREFLGKAGFCRLWIPGFAEMAAPLYPLTKTGTLFNWGPDQQKAYQEIKQALLTAPALGLPDLTKPFELFVDEKQGYAKGVLTQKLGPWRRPVAYLSKKLDPVAAGWPPCLRMVAAIAVLTKDAGKLTMGQPLNILAPHAVEALVKQPPDRWLSNARMTHYQALLLDNDRVQFGPVVALNPATLLPLPEEGLQHNCLDILAEAHGTRPDLTDQPLPDADHTWYTGGSSLLQEGQRKAGAAVTTETEVIWAKALPAGTSAQRAQLIALTQALKMAEGKKLNVYTNSRYAFATAHWHGEIYRRRGLLTSEGKEIKNKDEILALLKALFLPKRLSIIHCPGHQKGHSAEARGNRMADQAARKAAITETPDTSTLLIENSSPYTSEHF

SEQ ID NO: 352 - protein, 704 aa, synthetic construct
  REGION 1..20
MGSSHHHHHHSSGLVPRGSHMTLNIEDEHRLHETSKEPDVSLGSTWLSDFPQAWAETGGMGLAVRQAPLIIPLKATSTPVSIKQYPMSREARLGIKPHIRRLYDQGILVPCQSPWNTPLRPVKKPGTNDYRPVQDLREVNKRVEDIHPTVPNPYNLLSGLPPSHQWYTVLDLKDAFFALRLHPTSQPLFAFEWRDPEMGISGQLTWTRLPQGFKNSPTLFDEALHRDLADFRIQHPDLILLQYVDDLLLAATSELDCQQGTRALLQTLGNLGYRASAKKAQICQKQVKYLGYLLKEGQRWITDARKETVMGQPTPKTPRELREFLGKAGFCRLWIPGFAEMAAPLYPLTKTGTLFNWGPDQQKAYQEIKQALLTAPALGLPDLTKPFELFVDEKQGYAKGVLTQKLGPWRRPVAYLSKKLDPVAAGWPPCLRMVAAIAVLTKDAGKLTMGQPLNILAPHAVEALVKQPPDRWLSNARMTHYQALLLDTDRVQFGPVVALNPATLLPLPEEALQHNCLDILAEAHGTRPDLTDQPLPDADHTWYTGGSSLLQEGQRKAGAAVTTETEVIWAKALPAGTSAQRAQLIALTQALKMAEGKKLNVYTNSRYAFATAHWHGEIYRRRGLLTSEGKEIKNKDEILALLKALFLPKRLSIIHCPGHQKGHSAEARGNRMADQAARKAAITETPDTSTLLIENSSPYTSEHF

SEQ ID NO: 353 - protein, 704 aa, synthetic construct; identical to SEQ ID NO: 352
  REGION 1..20

SEQ ID NO: 354 - protein, 522 aa, synthetic construct
  REGION 1..20
MGSSHHHHHHSSGLVPRGSHMTLNIEDEHRLHETSKEPDVSLGSTWLSDFPQAWAETGGMGLAVRQAPLIIPLKATSTPVSIKQYPMSREARLGIKPHIRRLYDQGILVPCQSPWNTPLRPVKKPGTNDYRPVQDLREVNKRVEDIHPTVPNPYNLLSGLPPSHQWYTVLDLKDAFFALRLHPTSQPLFAFEWRDPEMGISGQLTWTRLPQGFKNSPTLFDEALHRDLADFRIQHPDLILLQYVDDLLLAATSELDCQQGTRALLQTLGNLGYRASAKKAQICQKQVKYLGYLLKEGQRWITDARKETVMGQPTPKTPRELREFLGKAGFCRLWIPGFAEMAAPLYPLTKTGTLFNWGPDQQKAYQEIKQALLTAPALGLPDLTKPFELFVDEKQGYAKGVLTQKLGPWRRPVAYLSKKLDPVAAGWPPCLRMVAAIAVLTKDAGKLTMGQPLNILAPHAVEALVKQPPDRWLSNARMTHYQALLLDTDRVQFGPVVALNPATLLPLPEEGLQHNCLDILAE

SEQ ID NO: 355 - protein, 704 aa, synthetic construct
  REGION 1..20
MGSSHHHHHHSSGLVPRGSHMTLNIEDEHRLHETSKEPDVSLGSTWLSDFPQAWAETGGMGLAVRQAPLIIPLKATSTPVSIKQYPMSREARLGIKPHIRRLYDQGILVPCQSPWNTPLRPVKKPGTNDYRPVQDLREVNKRVEDIHPTVPNPYNLLSGLPPSHQWYTVLDLKDAFFALRLHPTSQPLFAFEWRDPEMGISGQLTWTRLPQGFKNSPTLFDEALHRDLADFRIQHPDLILLQYVDDLLLAATSELDCQQGTRALLQTLGNLGYRASAKKAQICQKQVKYLGYLLKEGQRWITDARKETVMGQPTPKTPRELREFLGKAGFCRLWIPGFAEMAAPLYPLTKTGTLFNWGPDQQKAYQEIKQALLTAPALGLPDLTKPFELFVDEKQGYAKGVLTQKLGPWRRPVAYLSKKLDPVAAGWPPCLRMVAAIAVLTKDAGKLTMGQPLNILAPHAVEALVKQPPDRWLSNARMTHYQALLLDTDRVQFGPVVALNPATLLPLPEEGLQHNCLDILAEAHGTRPDLTDQPLPDADHTWYTGGSSYLQEGQRKAGAAVTTETEVIWAKALPAGTSAQRAQLIALTQALKMAEGKKLNVYTNSRYAFATAHWHGEIYRRRGLLTSEGKEIKNKDEILALLKALFLPKRLSIIHCPGHQKGHSAEARGNRMADQAARKAAITETPDTSTLLIENSSPYTSEHF

SEQ ID NO: 356 - protein, 704 aa, synthetic construct
  REGION 1..20
MGSSHHHHHHSSGLVPRGSHMTLNIEDEHRLHETSKEPDVSLGSTWLSDFPQAWAETGGMGLAVRQAPLIIPLKATSTPVSIKQYPMSREARLGIKPHIRRLYDQGILVPCQSPWNTPLRPVKKPGTNDYRPVQDLREVNKRVEDIHPTVPNPYNLLSGLPPSHQWYTVLDLKDAFFALRLHPTSQPLFAFEWRDPEMGISGQLTWTRLPQGFKNSPTLFDEALHRDLADFRIQHPDLILLQYVDDLLLAATSELDCQQGTRALLQTLGNLGYRASAKKAQICQKQVKYLGYLLKEGQRWITDARKETVMGQPTPKTPRELREFLGKAGFCRLWIPGFAEMAAPLYPLTKTGTLFNWGPDQQKAYQEIKQALLTAPALGLPDLTKPFELFVDEKQGYAKGVLTQKLGPWRRPVAYLSKKLDPVAAGWPPCLRMVAAIAVLTKDAGKLTMGQPLNILAPHAVEALVKQPPDRWLSNARMTHYQALLLDTDRVQFGPVVALNPATLLPLPEEGLQHNCLDILAEAHGTRPDLTDQPLPDADHTWYTGGSSLLQEGQRKAGAAVTTETEVIWAKALPAGTSAQRAQLIALTQALKMAEGKKLNVYTNSRYAFATAHWHGEIYRRRGLLTSEGKEIKNKDEILALLKALFLPKMLSIIHCPGHQKGHSAEARGNRMADQAARKAAITETPDTSTLLIENSSPYTSEHF

SEQ ID NO: 357 - protein, 704 aa, synthetic construct
  REGION 1..20
MGSSHHHHHHSSGLVPRGSHMTLNIEDEHRLHETSKEPDVSLGSTWLSDFPQAWAETGGMGLAVRQAPLIIPLKATSTPVSIKQYPMSREARLGIKPHIRRLYDQGILVPCQSPWNTPLRPVKKPGTNDYRPVQDLREVNKRVEDIHPTVPNPYNLLSGLPPSHQWYTVLDLKDAFFALRLHPTSQPLFAFEWRDPEMGISGQLTWTRLPQGFKNSPTLFDEALHRDLADFRIQHPDLILLQYVDDLLLAATSELDCQQGTRALLQTLGNLGYRASAKKAQICQKQVKYLGYLLKEGQRWITDARKETVMGQPTPKTPRELREFLGKAGFCRLWIPGFAEMAAPLYPLTKTGTLFNWGPDQQKAYQEIKQALLTAPALGLPDLTKPFELFVDEKQGYAKGVLTQKLGPWRRPVAYLSKKLDPVAAGWPPCLRMVAAIAVLTKDAGKLTMGQPLNILAPHAVEALVKQPPDRWLSNARMTHYQALLLDTDRVQFGPVVALNPATLLPLPEEGLQHNCLDILAEAHGTRPDLTDQPLPDADHTWYTGGSSLLQEGQRKAGAAVTTETEVIWAKALPAGTSAQRAQLIALTQALKMAEGKKLNVYTNSRYAFATAHWHGEIYRRRGLLTSEGKEIKNKDEILALLKALFLPKRLSIIHCPGHQKGHSAEVRGNRMADQAARKAAITETPDTSTLLIENSSPYTSEHF

SEQ ID NO: 358 - protein, 704 aa, synthetic construct
  REGION 1..20
MGSSHHHHHHSSGLVPRGSHMTLNIEDEHALHETSKEPDVSLGSTWLSDFPQAWAETGGMGLAVRQAPLIIPLKATSTPVSIKQYPMSREARLGIKPHIRRLYDQGILVPCQSPWNTPLRPVKKPGTNDYRPVQDLREVNKRVEDIHPTVPNPYNLLSGLPPSHQWYTVLDLKDAFFCLPLHPTSQPLFAFEWRDPEMGISGQLTWTRLPQGFKNSPTLFDEALHRDLADFRIQHPDLILLQYVDDLLLAATSELDCQQGTRALLQTLGNLGYRASAKKAQICQKQVKYLGYLLKEGQRWITDARKETVMGQPTPKTPRELREFLGKAGFCRLWIPGFAEMAAPLYPLTKTGTLFNWGPDQQKAYQEIKQALLTAPALGLPDLTKPFELFVDEKQGYAKGVLTQKLGPWRRPVAYLSKKLDPVAAGWPPCLRMVAAIAVLTKDAGKLTMGQPLNILAPHAVEALVKQPPDRWLSNARMTHYQALLLDTDRVQFGPVVALNPATLLPLPEEGLQHNCLDILAEAHGTRPDLTDQPLPDADHTWYTGGSSLLQEGQRKAGAAVTTETEVIWAKALPAGTSAQRAQLIALTQALKMAEGKKLNVYTNSRYAFATAHWHGEIYRRRGLLTSEGKEIKNKDEILALLKALFLPKRLSIIHCPGHQKGHSAEARGNRMADQAARKAAITETPDTSTLLIENSSPYTSEHF

SEQ ID NO: 359 - protein, 704 aa, synthetic construct
  REGION 1..20
MGSSHHHHHHSSGLVPRGSHMTLNIEDEHALHETSKEPDVSLGSTWLSDFPQAWAETGGMGLAVRQAPLIIPLKATSTPVSIKQYPMSREARLGIKPHIRRLYDQGILVPCQSPWNTPLRPVKKPGTNDYRPVQDLREVNKRVEDIHPTVPNPYNLLSGLPPSHQWYTVLDLKDAFFCLSLHPTSQPLFAFEWRDPEMGISGQLTWTRLPQGFKNSPTLFDEALHRDLADFRIQHPDLILLQYVDDLLLAATSELDCQQGTRALLQTLGNLGYRASAKKAQICQKQVKYLGYLLKEGQRWITDARKETVMGQPTPKTPRELREFLGKAGFCRLWIPGFAEMAAPLYPLTKTGTLFNWGPDQQKAYQEIKQALLTAPALGLPDLTKPFELFVDEKQGYAKGVLTQKLGPWRRPVAYLSKKLDPVAAGWPPCLRMVAAIAVLTKDAGKLTMGQPLNILAPHAVEALVKQPPDRWLSNARMTHYQALLLDTDRVQFGPVVALNPATLLPLPEEGLQHNCLDILAEAHGTRPDLTDQPLPDADHTWYTGGSSLLQEGQRKAGAAVTTETEVIWAKALPAGTSAQRAQLIALTQALKMAEGKKLNVYTNSRYAFATAHWHGEIYRRRGLLTSEGKEIKNKDEILALLKALFLPKRLSIIHCPGHQKGHSAEARGNRMADQAARKAAITETPDTSTLLIENSSPYTSEHF

SEQ ID NO: 360 - protein, 704 aa, synthetic construct
  REGION 1..20
MGSSHHHHHHSSGLVPRGSHMTLNIEDEHALHETSKEPDVSLGSTWLSDFPQAWAETGGMGLAVRQAPLIIPLKATSTPVSIKQYPMSREARLGIKPHIRRLYDQGILVPCQSPWNTPLRPVKKPGTNDYRPVQDLREVNKRVEDIHPTVPNPYNLLSGLPPSHQWYTVLDLKDAFFCLRLHPTSQPLFAFEWEDPEMGISGQLTWTRLPQGFKNSPTLFDEALHRDLADFRIQHPDLILLQYVDDLLLAATSELDCQQGTRALLQTLGNLGYRASAKKAQICQKQVKYLGYLLKEGQRWITDARKETVMGQPTPKTPRELREFLGKAGFCRLWIPGFAEMAAPLYPLTKTGTLFNWGPDQQKAYQEIKQALLTAPALGLPDLTKPFELFVDEKQGYAKGVLTQKLGPWRRPVAYLSKKLDPVAAGWPPCLRMVAAIAVLTKDAGKLTMGQPLNILAPHAVEALVKQPPDRWLSNARMTHYQALLLDTDRVQFGPVVALNPATLLPLPEEGLQHNCLDILAEAHGTRPDLTDQPLPDADHTWYTGGSSLLQEGQRKAGAAVTTETEVIWAKALPAGTSAQRAQLIALTQALKMAEGKKLNVYTNSRYAFATAHWHGEIYRRRGLLTSEGKEIKNKDEILALLKALFLPKRLSIIHCPGHQKGHSAEARGNRMADQAARKAAITETPDTSTLLIENSSPYTSEHF

SEQ ID NO: 361 - protein, 704 aa, synthetic construct
  REGION 1..20
MGSSHHHHHHSSGLVPRGSHMTLNIEDEHALHETSKEPDVSLGSTWLSDFPQAWAETGGMGLAVRQAPLIIPLKATSTPVSIKQYPMSREARLGIKPHIRRLYDQGILVPCQSPWNTPLRPVKKPGTNDYRPVQDLREVNKRVEDIHPTVPNPYNLLSGLPPSHQWYTVLDLKDAFFCLRLHPTSQPLFAFEWRDPEMGISGQLTWTRLPQGFKNSPTLFDEALHRDLADFRIQHPDLILLQYVDDLLLAATSELDCQQGTRALLQTLGNLGYRASAKKAQICQKQVKYLGYLLKEGQRWITDARKEDVMGQPTPKTPRELREFLGKAGFCRLWIPGFAEMAAPLYPLTKTGTLFNWGPDQQKAYQEIKQALLTAPALGLPDLTKPFELFVDEKQGYAKGVLTQKLGPWRRPVAYLSKKLDPVAAGWPPCLRMVAAIAVLTKDAGKLTMGQPLNILAPHAVEALVKQPPDRWLSNARMTHYQALLLDTDRVQFGPVVALNPATLLPLPEEGLQHNCLDILAEAHGTRPDLTDQPLPDADHTWYTGGSSLLQEGQRKAGAAVTTETEVIWAKALPAGTSAQRAQLIALTQALKMAEGKKLNVYTNSRYAFATAHWHGEIYRRRGLLTSEGKEIKNKDEILALLKALFLPKRLSIIHCPGHQKGHSAEARGNRMADQAARKAAITETPDTSTLLIENSSPYTSEHF

SEQ ID NO: 362 - protein, 704 aa, synthetic construct
  REGION 1..20
MGSSHHHHHHSSGLVPRGSHMTLNIEDEHALHETSKEPDVSLGSTWLSDFPQAWAETGGMGLAVRQAPLIIPLKATSTPVSIKQYPMSREARLGIKPHIRRLYDQGILVPCQSPWNTPLRPVKKPGTNDYRPVQDLREVNKRVEDIHPTVPNPYNLLSGLPPSHQWYTVLDLKDAFFCLRLHPTSQPLFAFEWRDPEMGISGQLTWTRLPQGFKNSPTLFDEALHRDLADFRIQHPDLILLQYVDDLLLAATSELDCQQGTRALLQTLGNLGYRASAKKAQICQKQVKYLGYLLKEGQRWITDARKETVMGQPTPKTPRELREFLGKAGFCRLWIPGFAEMAAPLYPLTKTGTEFNWGPDQQKAYQEIKQALLTAPALGLPDLTKPFELFVDEKQGYAKGVLTQKLGPWRRPVAYLSKKLDPVAAGWPPCLRMVAAIAVLTKDAGKLTMGQPLNILAPHAVEALVKQPPDRWLSNARMTHYQALLLDTDRVQFGPVVALNPATLLPLPEEGLQHNCLDILAEAHGTRPDLTDQPLPDADHTWYTGGSSLLQEGQRKAGAAVTTETEVIWAKALPAGTSAQRAQLIALTQALKMAEGKKLNVYTNSRYAFATAHWHGEIYRRRGLLTSEGKEIKNKDEILALLKALFLPKRLSIIHCPGHQKGHSAEARGNRMADQAARKAAITETPDTSTLLIENSSPYTSEHF

SEQ ID NO: 363 - protein, 704 aa, synthetic construct
  REGION 1..20
MGSSHHHHHHSSGLVPRGSHMTLNIEDEHALHETSKEPDVSLGSTWLSDFPQAWAETGGMGLAVRQAPLIIPLKATSTPVSIKQYPMSREARLGIKPHIRRLYDQGILVPCQSPWNTPLRPVKKPGTNDYRPVQDLREVNKRVEDIHPTVPNPYNLLSGLPPSHQWYTVLDLKDAFFCLRLHPTSQPLFAFEWRDPEMGISGQLTWTRLPQGFKNSPTLFDEALHRDLADFRIQHPDLILLQYVDDLLLAATSELDCQQGTRALLQTLGNLGYRASAKKAQICQKQVKYLGYLLKEGQRWITDARKETVMGQPTPKTPRELREFLGKAGFCRLWIPGFAEMAAPLYPLTKTGTLFNWGPDQQKAYQEIKQALLTAPALGLPDLTKPFELFVDEKQGYAKGVLTQKLGPWRRPVAYLSKKLDPVAAGWPPCLRMVAAIAVLTKDAGKLTMGQPLTILAPHAVEALVKQPPDRWLSNARMTHYQALLLDTDRVQFGPVVALNPATLLPLPEEGLQHNCLDILAEAHGTRPDLTDQPLPDADHTWYTGGSSLLQEGQRKAGAAVTTETEVIWAKALPAGTSAQRAQLIALTQALKMAEGKKLNVYTNSRYAFATAHWHGEIYRRRGLLTSEGKEIKNKDEILALLKALFLPKRLSIIHCPGHQKGHSAEARGNRMADQAARKAAITETPDTSTLLIENSSPYTSEHF

SEQ ID NO: 364 - protein, 704 aa, synthetic construct
  REGION 1..20
MGSSHHHHHHSSGLVPRGSHMTLNIEDEHALHETSKEPDVSLGSTWLSDFPQAWAETGGMGLAVRQAPLIIPLKATSTPVSIKQYPMSREARLGIKPHIRRLYDQGILVPCQSPWNTPLRPVKKPGTNDYRPVQDLREVNKRVEDIHPTVPNPYNLLSGLPPSHQWYTVLDLKDAFFCLRLHPTSQPLFAFEWRDPEMGISGQLTWTRLPQGFKNSPTLFDEALHRDLADFRIQHPDLILLQYVDDLLLAATSELDCQQGTRALLQTLGNLGYRASAKKAQICQKQVKYLGYLLKEGQRWITDARKETVMGQPTPKTPRELREFLGKAGFCRLWIPGFAEMAAPLYPLTKTGTLFNWGPDQQKAYQEIKQALLTAPALGLPDLTKPFELFVDEKQGYAKGVLTQKLGPWRRPVAYLSKKLDPVAAGWPPCLRMVAAIAVLTKDAGKLTMGQPLNIHAPHAVEALVKQPPDRWLSNARMTHYQALLLDTDRVQFGPVVALNPATLLPLPEEGLQHNCLDILAEAHGTRPDLTDQPLPDADHTWYTGGSSLLQEGQRKAGAAVTTETEVIWAKALPAGTSAQRAQLIALTQALKMAEGKKLNVYTNSRYAFATAHWHGEIYRRRGLLTSEGKEIKNKDEILALLKALFLPKRLSIIHCPGHQKGHSAEARGNRMADQAARKAAITETPDTSTLLIENSSPYTSEHF

SEQ ID NO: 365 - protein, 704 aa, synthetic construct
  REGION 1..20
MGSSHHHHHHSSGLVPRGSHMTLNIEDEHALHETSKEPDVSLGSTWLSDFPQAWAETGGMGLAVRQAPLIIPLKATSTPVSIKQYPMSREARLGIKPHIRRLYDQGILVPCQSPWNTPLRPVKKPGTNDYRPVQDLREVNKRVEDIHPTVPNPYNLLSGLPPSHQWYTVLDLKDAFFCLRLHPTSQPLFAFEWRDPEMGISGQLTWTRLPQGFKNSPTLFDEALHRDLADFRIQHPDLILLQYVDDLLLAATSELDCQQGTRALLQTLGNLGYRASAKKAQICQKQVKYLGYLLKEGQRWITDARKETVMGQPTPKTPRELREFLGKAGFCRLWIPGFAEMAAPLYPLTKTGTLFNWGPDQQKAYQEIKQALLTAPALGLPDLTKPFELFVDEKQGYAKGVLTQKLGPWRRPVAYLSKKLDPVAAGWPPCLRMVAAIAVLTKDAGKLTMGQPLNILAPHAVEALVKQPPDRWLSNARMTHYQALLLDNDRVQFGPVVALNPATLLPLPEEGLQHNCLDILAEAHGTRPDLTDQPLPDADHTWYTGGSSLLQEGQRKAGAAVTTETEVIWAKALPAGTSAQRAQLIALTQALKMAEGKKLNVYTNSRYAFATAHWHGEIYRRRGLLTSEGKEIKNKDEILALLKALFLPKRLSIIHCPGHQKGHSAEARGNRMADQAARKAAITETPDTSTLLIENSSPYTSEHF

SEQ ID NO: 366 - protein, 704 aa, synthetic construct
  REGION 1..20
MGSSHHHHHHSSGLVPRGSHMTLNIEDEHALHETSKEPDVSLGSTWLSDFPQAWAETGGMGLAVRQAPLIIPLKATSTPVSIKQYPMSREARLGIKPHIRRLYDQGILVPCQSPWNTPLRPVKKPGTNDYRPVQDLREVNKRVEDIHPTVPNPYNLLSGLPPSHQWYTVLDLKDAFFCLRLHPTSQPLFAFEWRDPEMGISGQLTWTRLPQGFKNSPTLFDEALHRDLADFRIQHPDLILLQYVDDLLLAATSELDCQQGTRALLQTLGNLGYRASAKKAQICQKQVKYLGYLLKEGQRWITDARKETVMGQPTPKTPRELREFLGKAGFCRLWIPGFAEMAAPLYPLTKTGTLFNWGPDQQKAYQEIKQALLTAPALGLPDLTKPFELFVDEKQGYAKGVLTQKLGPWRRPVAYLSKKLDPVAAGWPPCLRMVAAIAVLTKDAGKLTMGQPLNILAPHAVEALVKQPPDRWLSNARMTHYQALLLDTDRVQFGPVVALNPATLLPLPEEALQHNCLDILAEAHGTRPDLTDQPLPDADHTWYTGGSSLLQEGQRKAGAAVTTETEVIWAKALPAGTSAQRAQLIALTQALKMAEGKKLNVYTNSRYAFATAHWHGEIYRRRGLLTSEGKEIKNKDEILALLKALFLPKRLSIIHCPGHQKGHSAEARGNRMADQAARKAAITETPDTSTLLIENSSPYTSEHF

SEQ ID NO: 367 - protein, 522 aa, synthetic construct
  REGION 1..20
MGSSHHHHHHSSGLVPRGSHMTLNIEDEHALHETSKEPDVSLGSTWLSDFPQAWAETGGMGLAVRQAPLIIPLKATSTPVSIKQYPMSREARLGIKPHIRRLYDQGILVPCQSPWNTPLRPVKKPGTNDYRPVQDLREVNKRVEDIHPTVPNPYNLLSGLPPSHQWYTVLDLKDAFFCLRLHPTSQPLFAFEWRDPEMGISGQLTWTRLPQGFKNSPTLFDEALHRDLADFRIQHPDLILLQYVDDLLLAATSELDCQQGTRALLQTLGNLGYRASAKKAQICQKQVKYLGYLLKEGQRWITDARKETVMGQPTPKTPRELREFLGKAGFCRLWIPGFAEMAAPLYPLTKTGTLFNWGPDQQKAYQEIKQALLTAPALGLPDLTKPFELFVDEKQGYAKGVLTQKLGPWRRPVAYLSKKLDPVAAGWPPCLRMVAAIAVLTKDAGKLTMGQPLNILAPHAVEALVKQPPDRWLSNARMTHYQALLLDTDRVQFGPVVALNPATLLPLPEEGLQHNCLDILAE

SEQ ID NO: 368 - protein, 704 aa, synthetic construct
  REGION 1..20
MGSSHHHHHHSSGLVPRGSHMTLNIEDEHALHETSKEPDVSLGSTWLSDFPQAWAETGGMGLAVRQAPLIIPLKATSTPVSIKQYPMSREARLGIKPHIRRLYDQGILVPCQSPWNTPLRPVKKPGTNDYRPVQDLREVNKRVEDIHPTVPNPYNLLSGLPPSHQWYTVLDLKDAFFCLRLHPTSQPLFAFEWRDPEMGISGQLTWTRLPQGFKNSPTLFDEALHRDLADFRIQHPDLILLQYVDDLLLAATSELDCQQGTRALLQTLGNLGYRASAKKAQICQKQVKYLGYLLKEGQRWITDARKETVMGQPTPKTPRELREFLGKAGFCRLWIPGFAEMAAPLYPLTKTGTLFNWGPDQQKAYQEIKQALLTAPALGLPDLTKPFELFVDEKQGYAKGVLTQKLGPWRRPVAYLSKKLDPVAAGWPPCLRMVAAIAVLTKDAGKLTMGQPLNILAPHAVEALVKQPPDRWLSNARMTHYQALLLDTDRVQFGPVVALNPATLLPLPEEGLQHNCLDILAEAHGTRPDLTDQPLPDADHTWYTGGSSYLQEGQRKAGAAVTTETEVIWAKALPAGTSAQRAQLIALTQALKMAEGKKLNVYTNSRYAFATAHWHGEIYRRRGLLTSEGKEIKNKDEILALLKALFLPKRLSIIHCPGHQKGHSAEARGNRMADQAARKAAITETPDTSTLLIENSSPYTSEHF

SEQ ID NO: 369 - protein, 704 aa, synthetic construct
  REGION 1..20
MGSSHHHHHHSSGLVPRGSHMTLNIEDEHALHETSKEPDVSLGSTWLSDFPQAWAETGGMGLAVRQAPLIIPLKATSTPVSIKQYPMSREARLGIKPHIRRLYDQGILVPCQSPWNTPLRPVKKPGTNDYRPVQDLREVNKRVEDIHPTVPNPYNLLSGLPPSHQWYTVLDLKDAFFCLRLHPTSQPLFAFEWRDPEMGISGQLTWTRLPQGFKNSPTLFDEALHRDLADFRIQHPDLILLQYVDDLLLAATSELDCQQGTRALLQTLGNLGYRASAKKAQICQKQVKYLGYLLKEGQRWITDARKETVMGQPTPKTPRELREFLGKAGFCRLWIPGFAEMAAPLYPLTKTGTLFNWGPDQQKAYQEIKQALLTAPALGLPDLTKPFELFVDEKQGYAKGVLTQKLGPWRRPVAYLSKKLDPVAAGWPPCLRMVAAIAVLTKDAGKLTMGQPLNILAPHAVEALVKQPPDRWLSNARMTHYQALLLDTDRVQFGPVVALNPATLLPLPEEGLQHNCLDILAEAHGTRPDLTDQPLPDADHTWYTGGSSLLQEGQRKAGAAVTTETEVIWAKALPAGTSAQRAQLIALTQALKMAEGKKLNVYTNSRYAFATAHWHGEIYRRRGLLTSEGKEIKNKDEILALLKALFLPKMLSIIHCPGHQKGHSAEARGNRMADQAARKAAITETPDTSTLLIENSSPYTSEHF

SEQ ID NO: 370 - protein, 704 aa, synthetic construct
  REGION 1..20
MGSSHHHHHHSSGLVPRGSHMTLNIEDEHALHETSKEPDVSLGSTWLSDFPQAWAETGGMGLAVRQAPLIIPLKATSTPVSIKQYPMSREARLGIKPHIRRLYDQGILVPCQSPWNTPLRPVKKPGTNDYRPVQDLREVNKRVEDIHPTVPNPYNLLSGLPPSHQWYTVLDLKDAFFCLRLHPTSQPLFAFEWRDPEMGISGQLTWTRLPQGFKNSPTLFDEALHRDLADFRIQHPDLILLQYVDDLLLAATSELDCQQGTRALLQTLGNLGYRASAKKAQICQKQVKYLGYLLKEGQRWITDARKETVMGQPTPKTPRELREFLGKAGFCRLWIPGFAEMAAPLYPLTKTGTLFNWGPDQQKAYQEIKQALLTAPALGLPDLTKPFELFVDEKQGYAKGVLTQKLGPWRRPVAYLSKKLDPVAAGWPPCLRMVAAIAVLTKDAGKLTMGQPLNILAPHAVEALVKQPPDRWLSNARMTHYQALLLDTDRVQFGPVVALNPATLLPLPEEGLQHNCLDILAEAHGTRPDLTDQPLPDADHTWYTGGSSLLQEGQRKAGAAVTTETEVIWAKALPAGTSAQRAQLIALTQALKMAEGKKLNVYTNSRYAFATAHWHGEIYRRRGLLTSEGKEIKNKDEILALLKALFLPKRLSIIHCPGHQKGHSAEVRGNRMADQAARKAAITETPDTSTLLIENSSPYTSEHF

SEQ ID NO: 371 - protein, 704 aa, synthetic construct
  REGION 1..20
MGSSHHHHHHSSGLVPRGSHMTLNIEDEHRLHETSKEPDVSLGSTWLSDFPQAWAETGGMGLAVRQAPLIIPLKATSTPVSIKQYPMSREARLGIKPHIRRLYDQGILVPCQSPWNTPLRPVKKPGTNDYRPVQDLREVNKRVEDIHPTVPNPYNLLSGLPPSHQWYTVLDLKDAFFCLPLHPTSQPLFAFEWEDPEMGISGQLTWTRLPQGFKNSPTLFDEALHRDLADFRIQHPDLILLQYVDDLLLAATSELDCQQGTRALLQTLGNLGYRASAKKAQICQKQVKYLGYLLKEGQRWITDARKETVMGQPTPKTPRELREFLGKAGFCRLWIPGFAEMAAPLYPLTKTGTLFNWGPDQQKAYQEIKQALLTAPALGLPDLTKPFELFVDEKQGYAKGVLTQKLGPWRRPVAYLSKKLDPVAAGWPPCLRMVAAIAVLTKDAGKLTMGQPLNILAPHAVEALVKQPPDRWLSNARMTHYQALLLDTDRVQFGPVVALNPATLLPLPEEGLQHNCLDILAEAHGTRPDLTDQPLPDADHTWYTGGSSLLQEGQRKAGAAVTTETEVIWAKALPAGTSAQRAQLIALTQALKMAEGKKLNVYTNSRYAFATAHWHGEIYRRRGLLTSEGKEIKNKDEILALLKALFLPKRLSIIHCPGHQKGHSAEARGNRMADQAARKAAITETPDTSTLLIENSSPYTSEHF

SEQ ID NO: 372 - protein, 704 aa, synthetic construct
  REGION 1..20
MGSSHHHHHHSSGLVPRGSHMTLNIEDEHRLHETSKEPDVSLGSTWLSDFPQAWAETGGMGLAVRQAPLIIPLKATSTPVSIKQYPMSREARLGIKPHIRRLYDQGILVPCQSPWNTPLRPVKKPGTNDYRPVQDLREVNKRVEDIHPTVPNPYNLLSGLPPSHQWYTVLDLKDAFFCLPLHPTSQPLFAFEWRDPEMGISGQLTWTRLPQGFKNSPTLFDEALHRDLADFRIQHPDLILLQYVDDLLLAATSELDCQQGTRALLQTLGNLGYRASAKKAQICQKQVKYLGYLLKEGQRWITDARKETVMGQPTPKTPRELREFLGKAGFCRLWIPGFAEMAAPLYPLTKTGTLFNWGPDQQKAYQEIKQALLTAPALGLPDLTKPFELFVDEKQGYAKGVLTQKLGPWRRPVAYLSKKLDPVAAGWPPCLRMVAAIAVLTKDAGKLTMGQPLTILAPHAVEALVKQPPDRWLSNARMTHYQALLLDTDRVQFGPVVALNPATLLPLPEEGLQHNCLDILAEAHGTRPDLTDQPLPDADHTWYTGGSSLLQEGQRKAGAAVTTETEVIWAKALPAGTSAQRAQLIALTQALKMAEGKKLNVYTNSRYAFATAHWHGEIYRRRGLLTSEGKEIKNKDEILALLKALFLPKRLSIIHCPGHQKGHSAEARGNRMADQAARKAAITETPDTSTLLIENSSPYTSEHF

SEQ ID NO: 373 - protein, 704 aa, synthetic construct
  REGION 1..20
MGSSHHHHHHSSGLVPRGSHMTLNIEDEHRLHETSKEPDVSLGSTWLSDFPQAWAETGGMGLAVRQAPLIIPLKATSTPVSIKQYPMSREARLGIKPHIRRLYDQGILVPCQSPWNTPLRPVKKPGTNDYRPVQDLREVNKRVEDIHPTVPNPYNLLSGLPPSHQWYTVLDLKDAFFCLPLHPTSQPLFAFEWRDPEMGISGQLTWTRLPQGFKNSPTLFDEALHRDLADFRIQHPDLILLQYVDDLLLAATSELDCQQGTRALLQTLGNLGYRASAKKAQICQKQVKYLGYLLKEGQRWITDARKETVMGQPTPKTPRELREFLGKAGFCRLWIPGFAEMAAPLYPLTKTGTLFNWGPDQQKAYQEIKQALLTAPALGLPDLTKPFELFVDEKQGYAKGVLTQKLGPWRRPVAYLSKKLDPVAAGWPPCLRMVAAIAVLTKDAGKLTMGQPLNILAPHAVEALVKQPPDRWLSNARMTHYQALLLDNDRVQFGPVVALNPATLLPLPEEGLQHNCLDILAEAHGTRPDLTDQPLPDADHTWYTGGSSLLQEGQRKAGAAVTTETEVIWAKALPAGTSAQRAQLIALTQALKMAEGKKLNVYTNSRYAFATAHWHGEIYRRRGLLTSEGKEIKNKDEILALLKALFLPKRLSIIHCPGHQKGHSAEARGNRMADQAARKAAITETPDTSTLLIENSSPYTSEHF

SEQ ID NO: 374 - protein, 522 aa, synthetic construct
  REGION 1..20
MGSSHHHHHHSSGLVPRGSHMTLNIEDEHRLHETSKEPDVSLGSTWLSDFPQAWAETGGMGLAVRQAPLIIPLKATSTPVSIKQYPMSREARLGIKPHIRRLYDQGILVPCQSPWNTPLRPVKKPGTNDYRPVQDLREVNKRVEDIHPTVPNPYNLLSGLPPSHQWYTVLDLKDAFFCLPLHPTSQPLFAFEWRDPEMGISGQLTWTRLPQGFKNSPTLFDEALHRDLADFRIQHPDLILLQYVDDLLLAATSELDCQQGTRALLQTLGNLGYRASAKKAQICQKQVKYLGYLLKEGQRWITDARKETVMGQPTPKTPRELREFLGKAGFCRLWIPGFAEMAAPLYPLTKTGTLFNWGPDQQKAYQEIKQALLTAPALGLPDLTKPFELFVDEKQGYAKGVLTQKLGPWRRPVAYLSKKLDPVAAGWPPCLRMVAAIAVLTKDAGKLTMGQPLNILAPHAVEALVKQPPDRWLSNARMTHYQALLLDTDRVQFGPVVALNPATLLPLPEEGLQHNCLDILAE

SEQ ID NO: 375 - protein, 704 aa, synthetic construct
  REGION 1..20
MGSSHHHHHHSSGLVPRGSHMTLNIEDEHRLHETSKEPDVSLGSTWLSDFPQAWAETGGMGLAVRQAPLIIPLKATSTPVSIKQYPMSREARLGIKPHIRRLYDQGILVPCQSPWNTPLRPVKKPGTNDYRPVQDLREVNKRVEDIHPTVPNPYNLLSGLPPSHQWYTVLDLKDAFFCLPLHPTSQPLFAFEWRDPEMGISGQLTWTRLPQGFKNSPTLFDEALHRDLADFRIQHPDLILLQYVDDLLLAATSELDCQQGTRALLQTLGNLGYRASAKKAQICQKQVKYLGYLLKEGQRWITDARKETVMGQPTPKTPRELREFLGKAGFCRLWIPGFAEMAAPLYPLTKTGTLFNWGPDQQKAYQEIKQALLTAPALGLPDLTKPFELFVDEKQGYAKGVLTQKLGPWRRPVAYLSKKLDPVAAGWPPCLRMVAAIAVLTKDAGKLTMGQPLNILAPHAVEALVKQPPDRWLSNARMTHYQALLLDTDRVQFGPVVALNPATLLPLPEEGLQHNCLDILAEAHGTRPDLTDQPLPDADHTWYTGGSSYLQEGQRKAGAAVTTETEVIWAKALPAGTSAQRAQLIALTQALKMAEGKKLNVYTNSRYAFATAHWHGEIYRRRGLLTSEGKEIKNKDEILALLKALFLPKRLSIIHCPGHQKGHSAEARGNRMADQAARKAAITETPDTSTLLIENSSPYTSEHF

SEQ ID NO: 376 - protein, 704 aa, synthetic construct
  REGION 1..20
MGSSHHHHHHSSGLVPRGSHMTLNIEDEHRLHETSKEPDVSLGSTWLSDFPQAWAETGGMGLAVRQAPLIIPLKATSTPVSIKQYPMSREARLGIKPHIRRLYDQGILVPCQSPWNTPLRPVKKPGTNDYRPVQDLREVNKRVEDIHPTVPNPYNLLSGLPPSHQWYTVLDLKDAFFCLSLHPTSQPLFAFEWEDPEMGISGQLTWTRLPQGFKNSPTLFDEALHRDLADFRIQHPDLILLQYVDDLLLAATSELDCQQGTRALLQTLGNLGYRASAKKAQICQKQVKYLGYLLKEGQRWITDARKETVMGQPTPKTPRELREFLGKAGFCRLWIPGFAEMAAPLYPLTKTGTLFNWGPDQQKAYQEIKQALLTAPALGLPDLTKPFELFVDEKQGYAKGVLTQKLGPWRRPVAYLSKKLDPVAAGWPPCLRMVAAIAVLTKDAGKLTMGQPLNILAPHAVEALVKQPPDRWLSNARMTHYQALLLDTDRVQFGPVVALNPATLLPLPEEGLQHNCLDILAEAHGTRPDLTDQPLPDADHTWYTGGSSLLQEGQRKAGAAVTTETEVIWAKALPAGTSAQRAQLIALTQALKMAEGKKLNVYTNSRYAFATAHWHGEIYRRRGLLTSEGKEIKNKDEILALLKALFLPKRLSIIHCPGHQKGHSAEARGNRMADQAARKAAITETPDTSTLLIENSSPYTSEHF

SEQ ID NO: 377 - protein, 704 aa, synthetic construct
  REGION 1..20
MGSSHHHHHHSSGLVPRGSHMTLNIEDEHRLHETSKEPDVSLGSTWLSDFPQAWAETGGMGLAVRQAPLIIPLKATSTPVSIKQYPMSREARLGIKPHIRRLYDQGILVPCQSPWNTPLRPVKKPGTNDYRPVQDLREVNKRVEDIHPTVPNPYNLLSGLPPSHQWYTVLDLKDAFFCLSLHPTSQPLFAFEWRDPEMGISGQLTWTRLPQGFKNSPTLFDEALHRDLADFRIQHPDLILLQYVDDLLLAATSELDCQQGTRALLQTLGNLGYRASAKKAQICQKQVKYLGYLLKEGQRWITDARKETVMGQPTPKTPRELREFLGKAGFCRLWIPGFAEMAAPLYPLTKTGTLFNWGPDQQKAYQEIKQALLTAPALGLPDLTKPFELFVDEKQGYAKGVLTQKLGPWRRPVAYLSKKLDPVAAGWPPCLRMVAAIAVLTKDAGKLTMGQPLTILAPHAVEALVKQPPDRWLSNARMTHYQALLLDTDRVQFGPVVALNPATLLPLPEEGLQHNCLDILAEAHGTRPDLTDQPLPDADHTWYTGGSSLLQEGQRKAGAAVTTETEVIWAKALPAGTSAQRAQLIALTQALKMAEGKKLNVYTNSRYAFATAHWHGEIYRRRGLLTSEGKEIKNKDEILALLKALFLPKRLSIIHCPGHQKGHSAEARGNRMADQAARKAAITETPDTSTLLIENSSPYTSEHF

SEQ ID NO: 378 - protein, 704 aa, synthetic construct
  REGION 1..20
MGSSHHHHHHSSGLVPRGSHMTLNIEDEHRLHETSKEPDVSLGSTWLSDFPQAWAETGGMGLAVRQAPLIIPLKATSTPVSIKQYPMSREARLGIKPHIRRLYDQGILVPCQSPWNTPLRPVKKPGTNDYRPVQDLREVNKRVEDIHPTVPNPYNLLSGLPPSHQWYTVLDLKDAFFCLSLHPTSQPLFAFEWRDPEMGISGQLTWTRLPQGFKNSPTLFDEALHRDLADFRIQHPDLILLQYVDDLLLAATSELDCQQGTRALLQTLGNLGYRASAKKAQICQKQVKYLGYLLKEGQRWITDARKETVMGQPTPKTPRELREFLGKAGFCRLWIPGFAEMAAPLYPLTKTGTLFNWGPDQQKAYQEIKQALLTAPALGLPDLTKPFELFVDEKQGYAKGVLTQKLGPWRRPVAYLSKKLDPVAAGWPPCLRMVAAIAVLTKDAGKLTMGQPLNILAPHAVEALVKQPPDRWLSNARMTHYQALLLDNDRVQFGPVVALNPATLLPLPEEGLQHNCLDILAEAHGTRPDLTDQPLPDADHTWYTGGSSLLQEGQRKAGAAVTTETEVIWAKALPAGTSAQRAQLIALTQALKMAEGKKLNVYTNSRYAFATAHWHGEIYRRRGLLTSEGKEIKNKDEILALLKALFLPKRLSIIHCPGHQKGHSAEARGNRMADQAARKAAITETPDTSTLLIENSSPYTSEHF

SEQ ID NO: 379 - protein, 522 aa, synthetic construct
  REGION 1..20
MGSSHHHHHHSSGLVPRGSHMTLNIEDEHRLHETSKEPDVSLGSTWLSDFPQAWAETGGMGLAVRQAPLIIPLKATSTPVSIKQYPMSREARLGIKPHIRRLYDQGILVPCQSPWNTPLRPVKKPGTNDYRPVQDLREVNKRVEDIHPTVPNPYNLLSGLPPSHQWYTVLDLKDAFFCLSLHPTSQPLFAFEWRDPEMGISGQLTWTRLPQGFKNSPTLFDEALHRDLADFRIQHPDLILLQYVDDLLLAATSELDCQQGTRALLQTLGNLGYRASAKKAQICQKQVKYLGYLLKEGQRWITDARKETVMGQPTPKTPRELREFLGKAGFCRLWIPGFAEMAAPLYPLTKTGTLFNWGPDQQKAYQEIKQALLTAPALGLPDLTKPFELFVDEKQGYAKGVLTQKLGPWRRPVAYLSKKLDPVAAGWPPCLRMVAAIAVLTKDAGKLTMGQPLNILAPHAVEALVKQPPDRWLSNARMTHYQALLLDTDRVQFGPVVALNPATLLPLPEEGLQHNCLDILAE

SEQ ID NO: 380 - protein, 704 aa, synthetic construct
  REGION 1..20
MGSSHHHHHHSSGLVPRGSHMTLNIEDEHRLHETSKEPDVSLGSTWLSDFPQAWAETGGMGLAVRQAPLIIPLKATSTPVSIKQYPMSREARLGIKPHIRRLYDQGILVPCQSPWNTPLRPVKKPGTNDYRPVQDLREVNKRVEDIHPTVPNPYNLLSGLPPSHQWYTVLDLKDAFFCLSLHPTSQPLFAFEWRDPEMGISGQLTWTRLPQGFKNSPTLFDEALHRDLADFRIQHPDLILLQYVDDLLLAATSELDCQQGTRALLQTLGNLGYRASAKKAQICQKQVKYLGYLLKEGQRWITDARKETVMGQPTPKTPRELREFLGKAGFCRLWIPGFAEMAAPLYPLTKTGTLFNWGPDQQKAYQEIKQALLTAPALGLPDLTKPFELFVDEKQGYAKGVLTQKLGPWRRPVAYLSKKLDPVAAGWPPCLRMVAAIAVLTKDAGKLTMGQPLNILAPHAVEALVKQPPDRWLSNARMTHYQALLLDTDRVQFGPVVALNPATLLPLPEEGLQHNCLDILAEAHGTRPDLTDQPLPDADHTWYTGGSSYLQEGQRKAGAAVTTETEVIWAKALPAGTSAQRAQLIALTQALKMAEGKKLNVYTNSRYAFATAHWHGEIYRRRGLLTSEGKEIKNKDEILALLKALFLPKRLSIIHCPGHQKGHSAEARGNRMADQAARKAAITETPDTSTLLIENSSPYTSEHF

SEQ ID NO: 381 - protein, 704 aa, synthetic construct
  REGION 1..20
MGSSHHHHHHSSGLVPRGSHMTLNIEDEHRLHETSKEPDVSLGSTWLSDFPQAWAETGGMGLAVRQAPLIIPLKATSTPVSIKQYPMSREARLGIKPHIRRLYDQGILVPCQSPWNTPLRPVKKPGTNDYRPVQDLREVNKRVEDIHPTVPNPYNLLSGLPPSHQWYTVLDLKDAFFCLRLHPTSQPLFAFEWEDPEMGISGQLTWTRLPQGFKNSPTLFDEALHRDLADFRIQHPDLILLQYVDDLLLAATSELDCQQGTRALLQTLGNLGYRASAKKAQICQKQVKYLGYLLKEGQRWITDARKEDVMGQPTPKTPRELREFLGKAGFCRLWIPGFAEMAAPLYPLTKTGTLFNWGPDQQKAYQEIKQALLTAPALGLPDLTKPFELFVDEKQGYAKGVLTQKLGPWRRPVAYLSKKLDPVAAGWPPCLRMVAAIAVLTKDAGKLTMGQPLNILAPHAVEALVKQPPDRWLSNARMTHYQALLLDTDRVQFGPVVALNPATLLPLPEEGLQHNCLDILAEAHGTRPDLTDQPLPDADHTWYTGGSSLLQEGQRKAGAAVTTETEVIWAKALPAGTSAQRAQLIALTQALKMAEGKKLNVYTNSRYAFATAHWHGEIYRRRGLLTSEGKEIKNKDEILALLKALFLPKRLSIIHCPGHQKGHSAEARGNRMADQAARKAAITETPDTSTLLIENSSPYTSEHF

SEQ ID NO: 382 - protein, 704 aa, synthetic construct
  REGION 1..20
MGSSHHHHHHSSGLVPRGSHMTLNIEDEHRLHETSKEPDVSLGSTWLSDFPQAWAETGGMGLAVRQAPLIIPLKATSTPVSIKQYPMSREARLGIKPHIRRLYDQGILVPCQSPWNTPLRPVKKPGTNDYRPVQDLREVNKRVEDIHPTVPNPYNLLSGLPPSHQWYTVLDLKDAFFCLRLHPTSQPLFAFEWEDPEMGISGQLTWTRLPQGFKNSPTLFDEALHRDLADFRIQHPDLILLQYVDDLLLAATSELDCQQGTRALLQTLGNLGYRASAKKAQICQKQVKYLGYLLKEGQRWITDARKETVMGQPTPKTPRELREFLGKAGFCRLWIPGFAEMAAPLYPLTKTGTEFNWGPDQQKAYQEIKQALLTAPALGLPDLTKPFELFVDEKQGYAKGVLTQKLGPWRRPVAYLSKKLDPVAAGWPPCLRMVAAIAVLTKDAGKLTMGQPLNILAPHAVEALVKQPPDRWLSNARMTHYQALLLDTDRVQFGPVVALNPATLLPLPEEGLQHNCLDILAEAHGTRPDLTDQPLPDADHTWYTGGSSLLQEGQRKAGAAVTTETEVIWAKALPAGTSAQRAQLIALTQALKMAEGKKLNVYTNSRYAFATAHWHGEIYRRRGLLTSEGKEIKNKDEILALLKALFLPKRLSIIHCPGHQKGHSAEARGNRMADQAARKAAITETPDTSTLLIENSSPYTSEHF

SEQ ID NO: 383 - protein, 704 aa, synthetic construct
  REGION 1..20
MGSSHHHHHHSSGLVPRGSHMTLNIEDEHRLHETSKEPDVSLGSTWLSDFPQAWAETGGMGLAVRQAPLIIPLKATSTPVSIKQYPMSREARLGIKPHIRRLYDQGILVPCQSPWNTPLRPVKKPGTNDYRPVQDLREVNKRVEDIHPTVPNPYNLLSGLPPSHQWYTVLDLKDAFFCLRLHPTSQPLFAFEWEDPEMGISGQLTWTRLPQGFKNSPTLFDEALHRDLADFRIQHPDLILLQYVDDLLLAATSELDCQQGTRALLQTLGNLGYRASAKKAQICQKQVKYLGYLLKEGQRWITDARKETVMGQPTPKTPRELREFLGKAGFCRLWIPGFAEMAAPLYPLTKTGTLFNWGPDQQKAYQEIKQALLTAPALGLPDLTKPFELFVDEKQGYAKGVLTQKLGPWRRPVAYLSKKLDPVAAGWPPCLRMVAAIAVLTKDAGKLTMGQPLTILAPHAVEALVKQPPDRWLSNARMTHYQALLLDTDRVQFGPVVALNPATLLPLPEEGLQHNCLDILAEAHGTRPDLTDQPLPDADHTWYTGGSSLLQEGQRKAGAAVTTETEVIWAKALPAGTSAQRAQLIALTQALKMAEGKKLNVYTNSRYAFATAHWHGEIYRRRGLLTSEGKEIKNKDEILALLKALFLPKRLSIIHCPGHQKGHSAEARGNRMADQAARKAAITETPDTSTLLIENSSPYTSEHF

SEQ ID NO: 384 - protein, 704 aa, synthetic construct
  REGION 1..20
MGSSHHHHHHSSGLVPRGSHMTLNIEDEHRLHETSKEPDVSLGSTWLSDFPQAWAETGGMGLAVRQAPLIIPLKATSTPVSIKQYPMSREARLGIKPHIRRLYDQGILVPCQSPWNTPLRPVKKPGTNDYRPVQDLREVNKRVEDIHPTVPNPYNLLSGLPPSHQWYTVLDLKDAFFCLRLHPTSQPLFAFEWEDPEMGISGQLTWTRLPQGFKNSPTLFDEALHRDLADFRIQHPDLILLQYVDDLLLAATSELDCQQGTRALLQTLGNLGYRASAKKAQICQKQVKYLGYLLKEGQRWITDARKETVMGQPTPKTPRELREFLGKAGFCRLWIPGFAEMAAPLYPLTKTGTLFNWGPDQQKAYQEIKQALLTAPALGLPDLTKPFELFVDEKQGYAKGVLTQKLGPWRRPVAYLSKKLDPVAAGWPPCLRMVAAIAVLTKDAGKLTMGQPLNIHAPHAVEALVKQPPDRWLSNARMTHYQALLLDTDRVQFGPVVALNPATLLPLPEEGLQHNCLDILAEAHGTRPDLTDQPLPDADHTWYTGGSSLLQEGQRKAGAAVTTETEVIWAKALPAGTSAQRAQLIALTQALKMAEGKKLNVYTNSRYAFATAHWHGEIYRRRGLLTSEGKEIKNKDEILALLKALFLPKRLSIIHCPGHQKGHSAEARGNRMADQAARKAAITETPDTSTLLIENSSPYTSEHF

SEQ ID NO: 385 - protein, 704 aa, synthetic construct
  REGION 1..20
MGSSHHHHHHSSGLVPRGSHMTLNIEDEHRLHETSKEPDVSLGSTWLSDFPQAWAETGGMGLAVRQAPLIIPLKATSTPVSIKQYPMSREARLGIKPHIRRLYDQGILVPCQSPWNTPLRPVKKPGTNDYRPVQDLREVNKRVEDIHPTVPNPYNLLSGLPPSHQWYTVLDLKDAFFCLRLHPTSQPLFAFEWEDPEMGISGQLTWTRLPQGFKNSPTLFDEALHRDLADFRIQHPDLILLQYVDDLLLAATSELDCQQGTRALLQTLGNLGYRASAKKAQICQKQVKYLGYLLKEGQRWITDARKETVMGQPTPKTPRELREFLGKAGFCRLWIPGFAEMAAPLYPLTKTGTLFNWGPDQQKAYQEIKQALLTAPALGLPDLTKPFELFVDEKQGYAKGVLTQKLGPWRRPVAYLSKKLDPVAAGWPPCLRMVAAIAVLTKDAGKLTMGQPLNILAPHAVEALVKQPPDRWLSNARMTHYQALLLDNDRVQFGPVVALNPATLLPLPEEGLQHNCLDILAEAHGTRPDLTDQPLPDADHTWYTGGSSLLQEGQRKAGAAVTTETEVIWAKALPAGTSAQRAQLIALTQALKMAEGKKLNVYTNSRYAFATAHWHGEIYRRRGLLTSEGKEIKNKDEILALLKALFLPKRLSIIHCPGHQKGHSAEARGNRMADQAARKAAITETPDTSTLLIENSSPYTSEHF

SEQ ID NO: 386 - protein, 704 aa, synthetic construct
  REGION 1..20
MGSSHHHHHHSSGLVPRGSHMTLNIEDEHRLHETSKEPDVSLGSTWLSDFPQAWAETGGMGLAVRQAPLIIPLKATSTPVSIKQYPMSREARLGIKPHIRRLYDQGILVPCQSPWNTPLRPVKKPGTNDYRPVQDLREVNKRVEDIHPTVPNPYNLLSGLPPSHQWYTVLDLKDAFFCLRLHPTSQPLFAFEWEDPEMGISGQLTWTRLPQGFKNSPTLFDEALHRDLADFRIQHPDLILLQYVDDLLLAATSELDCQQGTRALLQTLGNLGYRASAKKAQICQKQVKYLGYLLKEGQRWITDARKETVMGQPTPKTPRELREFLGKAGFCRLWIPGFAEMAAPLYPLTKTGTLFNWGPDQQKAYQEIKQALLTAPALGLPDLTKPFELFVDEKQGYAKGVLTQKLGPWRRPVAYLSKKLDPVAAGWPPCLRMVAAIAVLTKDAGKLTMGQPLNILAPHAVEALVKQPPDRWLSNARMTHYQALLLDTDRVQFGPVVALNPATLLPLPEEALQHNCLDILAEAHGTRPDLTDQPLPDADHTWYTGGSSLLQEGQRKAGAAVTTETEVIWAKALPAGTSAQRAQLIALTQALKMAEGKKLNVYTNSRYAFATAHWHGEIYRRRGLLTSEGKEIKNKDEILALLKALFLPKRLSIIHCPGHQKGHSAEARGNRMADQAARKAAITETPDTSTLLIENSSPYTSEHF

SEQ ID NO: 387 - protein, 522 aa, synthetic construct
  REGION 1..20
MGSSHHHHHHSSGLVPRGSHMTLNIEDEHRLHETSKEPDVSLGSTWLSDFPQAWAETGGMGLAVRQAPLIIPLKATSTPVSIKQYPMSREARLGIKPHIRRLYDQGILVPCQSPWNTPLRPVKKPGTNDYRPVQDLREVNKRVEDIHPTVPNPYNLLSGLPPSHQWYTVLDLKDAFFCLRLHPTSQPLFAFEWEDPEMGISGQLTWTRLPQGFKNSPTLFDEALHRDLADFRIQHPDLILLQYVDDLLLAATSELDCQQGTRALLQTLGNLGYRASAKKAQICQKQVKYLGYLLKEGQRWITDARKETVMGQPTPKTPRELREFLGKAGFCRLWIPGFAEMAAPLYPLTKTGTLFNWGPDQQKAYQEIKQALLTAPALGLPDLTKPFELFVDEKQGYAKGVLTQKLGPWRRPVAYLSKKLDPVAAGWPPCLRMVAAIAVLTKDAGKLTMGQPLNILAPHAVEALVKQPPDRWLSNARMTHYQALLLDTDRVQFGPVVALNPATLLPLPEEGLQHNCLDILAE

SEQ ID NO: 388 - protein, 704 aa, synthetic construct
  REGION 1..20
MGSSHHHHHHSSGLVPRGSHMTLNIEDEHRLHETSKEPDVSLGSTWLSDFPQAWAETGGMGLAVRQAPLIIPLKATSTPVSIKQYPMSREARLGIKPHIRRLYDQGILVPCQSPWNTPLRPVKKPGTNDYRPVQDLREVNKRVEDIHPTVPNPYNLLSGLPPSHQWYTVLDLKDAFFCLRLHPTSQPLFAFEWEDPEMGISGQLTWTRLPQGFKNSPTLFDEALHRDLADFRIQHPDLILLQYVDDLLLAATSELDCQQGTRALLQTLGNLGYRASAKKAQICQKQVKYLGYLLKEGQRWITDARKETVMGQPTPKTPRELREFLGKAGFCRLWIPGFAEMAAPLYPLTKTGTLFNWGPDQQKAYQEIKQALLTAPALGLPDLTKPFELFVDEKQGYAKGVLTQKLGPWRRPVAYLSKKLDPVAAGWPPCLRMVAAIAVLTKDAGKLTMGQPLNILAPHAVEALVKQPPDRWLSNARMTHYQALLLDTDRVQFGPVVALNPATLLPLPEEGLQHNCLDILAEAHGTRPDLTDQPLPDADHTWYTGGSSYLQEGQRKAGAAVTTETEVIWAKALPAGTSAQRAQLIALTQALKMAEGKKLNVYTNSRYAFATAHWHGEIYRRRGLLTSEGKEIKNKDEILALLKALFLPKRLSIIHCPGHQKGHSAEARGNRMADQAARKAAITETPDTSTLLIENSSPYTSEHF

SEQ ID NO: 389 - protein, 704 aa, synthetic construct
  REGION 1..20
MGSSHHHHHHSSGLVPRGSHMTLNIEDEHRLHETSKEPDVSLGSTWLSDFPQAWAETGGMGLAVRQAPLIIPLKATSTPVSIKQYPMSREARLGIKPHIRRLYDQGILVPCQSPWNTPLRPVKKPGTNDYRPVQDLREVNKRVEDIHPTVPNPYNLLSGLPPSHQWYTVLDLKDAFFCLRLHPTSQPLFAFEWEDPEMGISGQLTWTRLPQGFKNSPTLFDEALHRDLADFRIQHPDLILLQYVDDLLLAATSELDCQQGTRALLQTLGNLGYRASAKKAQICQKQVKYLGYLLKEGQRWITDARKETVMGQPTPKTPRELREFLGKAGFCRLWIPGFAEMAAPLYPLTKTGTLFNWGPDQQKAYQEIKQALLTAPALGLPDLTKPFELFVDEKQGYAKGVLTQKLGPWRRPVAYLSKKLDPVAAGWPPCLRMVAAIAVLTKDAGKLTMGQPLNILAPHAVEALVKQPPDRWLSNARMTHYQALLLDTDRVQFGPVVALNPATLLPLPEEGLQHNCLDILAEAHGTRPDLTDQPLPDADHTWYTGGSSLLQEGQRKAGAAVTTETEVIWAKALPAGTSAQRAQLIALTQALKMAEGKKLNVYTNSRYAFATAHWHGEIYRRRGLLTSEGKEIKNKDEILALLKALFLPKMLSIIHCPGHQKGHSAEARGNRMADQAARKAAITETPDTSTLLIENSSPYTSEHF

SEQ ID NO: 390 - protein, 704 aa, synthetic construct
  REGION 1..20
MGSSHHHHHHSSGLVPRGSHMTLNIEDEHRLHETSKEPDVSLGSTWLSDFPQAWAETGGMGLAVRQAPLIIPLKATSTPVSIKQYPMSREARLGIKPHIRRLYDQGILVPCQSPWNTPLRPVKKPGTNDYRPVQDLREVNKRVEDIHPTVPNPYNLLSGLPPSHQWYTVLDLKDAFFCLRLHPTSQPLFAFEWEDPEMGISGQLTWTRLPQGFKNSPTLFDEALHRDLADFRIQHPDLILLQYVDDLLLAATSELDCQQGTRALLQTLGNLGYRASAKKAQICQKQVKYLGYLLKEGQRWITDARKETVMGQPTPKTPRELREFLGKAGFCRLWIPGFAEMAAPLYPLTKTGTLFNWGPDQQKAYQEIKQALLTAPALGLPDLTKPFELFVDEKQGYAKGVLTQKLGPWRRPVAYLSKKLDPVAAGWPPCLRMVAAIAVLTKDAGKLTMGQPLNILAPHAVEALVKQPPDRWLSNARMTHYQALLLDTDRVQFGPVVALNPATLLPLPEEGLQHNCLDILAEAHGTRPDLTDQPLPDADHTWYTGGSSLLQEGQRKAGAAVTTETEVIWAKALPAGTSAQRAQLIALTQALKMAEGKKLNVYTNSRYAFATAHWHGEIYRRRGLLTSEGKEIKNKDEILALLKALFLPKRLSIIHCPGHQKGHSAEVRGNRMADQAARKAAITETPDTSTLLIENSSPYTSEHF

SEQ ID NO: 391 - protein, 704 aa, synthetic construct
  REGION 1..20
MGSSHHHHHHSSGLVPRGSHMTLNIEDEHRLHETSKEPDVSLGSTWLSDFPQAWAETGGMGLAVRQAPLIIPLKATSTPVSIKQYPMSREARLGIKPHIRRLYDQGILVPCQSPWNTPLRPVKKPGTNDYRPVQDLREVNKRVEDIHPTVPNPYNLLSGLPPSHQWYTVLDLKDAFFCLRLHPTSQPLFAFEWRDPEMGISGQLTWTRLPQGFKNSPTLFDEALHRDLADFRIQHPDLILLQYVDDLLLAATSELDCQQGTRALLQTLGNLGYRASAKKAQICQKQVKYLGYLLKEGQRWITDARKEDVMGQPTPKTPRELREFLGKAGFCRLWIPGFAEMAAPLYPLTKTGTLFNWGPDQQKAYQEIKQALLTAPALGLPDLTKPFELFVDEKQGYAKGVLTQKLGPWRRPVAYLSKKLDPVAAGWPPCLRMVAAIAVLTKDAGKLTMGQPLTILAPHAVEALVKQPPDRWLSNARMTHYQALLLDTDRVQFGPVVALNPATLLPLPEEGLQHNCLDILAEAHGTRPDLTDQPLPDADHTWYTGGSSLLQEGQRKAGAAVTTETEVIWAKALPAGTSAQRAQLIALTQALKMAEGKKLNVYTNSRYAFATAHWHGEIYRRRGLLTSEGKEIKNKDEILALLKALFLPKRLSIIHCPGHQKGHSAEARGNRMADQAARKAAITETPDTSTLLIENSSPYTSEHF

SEQ ID NO: 392 - protein, 704 aa, synthetic construct
  REGION 1..20
MGSSHHHHHHSSGLVPRGSHMTLNIEDEHRLHETSKEPDVSLGSTWLSDFPQAWAETGGMGLAVRQAPLIIPLKATSTPVSIKQYPMSREARLGIKPHIRRLYDQGILVPCQSPWNTPLRPVKKPGTNDYRPVQDLREVNKRVEDIHPTVPNPYNLLSGLPPSHQWYTVLDLKDAFFCLRLHPTSQPLFAFEWRDPEMGISGQLTWTRLPQGFKNSPTLFDEALHRDLADFRIQHPDLILLQYVDDLLLAATSELDCQQGTRALLQTLGNLGYRASAKKAQICQKQVKYLGYLLKEGQRWITDARKEDVMGQPTPKTPRELREFLGKAGFCRLWIPGFAEMAAPLYPLTKTGTLFNWGPDQQKAYQEIKQALLTAPALGLPDLTKPFELFVDEKQGYAKGVLTQKLGPWRRPVAYLSKKLDPVAAGWPPCLRMVAAIAVLTKDAGKLTMGQPLNILAPHAVEALVKQPPDRWLSNARMTHYQALLLDNDRVQFGPVVALNPATLLPLPEEGLQHNCLDILAEAHGTRPDLTDQPLPDADHTWYTGGSSLLQEGQRKAGAAVTTETEVIWAKALPAGTSAQRAQLIALTQALKMAEGKKLNVYTNSRYAFATAHWHGEIYRRRGLLTSEGKEIKNKDEILALLKALFLPKRLSIIHCPGHQKGHSAEARGNRMADQAARKAAITETPDTSTLLIENSSPYTSEHF

SEQ ID NO: 393 - protein, 522 aa, synthetic construct
  REGION 1..20
MGSSHHHHHHSSGLVPRGSHMTLNIEDEHRLHETSKEPDVSLGSTWLSDFPQAWAETGGMGLAVRQAPLIIPLKATSTPVSIKQYPMSREARLGIKPHIRRLYDQGILVPCQSPWNTPLRPVKKPGTNDYRPVQDLREVNKRVEDIHPTVPNPYNLLSGLPPSHQWYTVLDLKDAFFCLRLHPTSQPLFAFEWRDPEMGISGQLTWTRLPQGFKNSPTLFDEALHRDLADFRIQHPDLILLQYVDDLLLAATSELDCQQGTRALLQTLGNLGYRASAKKAQICQKQVKYLGYLLKEGQRWITDARKEDVMGQPTPKTPRELREFLGKAGFCRLWIPGFAEMAAPLYPLTKTGTLFNWGPDQQKAYQEIKQALLTAPALGLPDLTKPFELFVDEKQGYAKGVLTQKLGPWRRPVAYLSKKLDPVAAGWPPCLRMVAAIAVLTKDAGKLTMGQPLNILAPHAVEALVKQPPDRWLSNARMTHYQALLLDTDRVQFGPVVALNPATLLPLPEEGLQHNCLDILAE

SEQ ID NO: 394 - protein, 704 aa, synthetic construct
  REGION 1..20
MGSSHHHHHHSSGLVPRGSHMTLNIEDEHRLHETSKEPDVSLGSTWLSDFPQAWAETGGMGLAVRQAPLIIPLKATSTPVSIKQYPMSREARLGIKPHIRRLYDQGILVPCQSPWNTPLRPVKKPGTNDYRPVQDLREVNKRVEDIHPTVPNPYNLLSGLPPSHQWYTVLDLKDAFFCLRLHPTSQPLFAFEWRDPEMGISGQLTWTRLPQGFKNSPTLFDEALHRDLADFRIQHPDLILLQYVDDLLLAATSELDCQQGTRALLQTLGNLGYRASAKKAQICQKQVKYLGYLLKEGQRWITDARKEDVMGQPTPKTPRELREFLGKAGFCRLWIPGFAEMAAPLYPLTKTGTLFNWGPDQQKAYQEIKQALLTAPALGLPDLTKPFELFVDEKQGYAKGVLTQKLGPWRRPVAYLSKKLDPVAAGWPPCLRMVAAIAVLTKDAGKLTMGQPLNILAPHAVEALVKQPPDRWLSNARMTHYQALLLDTDRVQFGPVVALNPATLLPLPEEGLQHNCLDILAEAHGTRPDLTDQPLPDADHTWYTGGSSYLQEGQRKAGAAVTTETEVIWAKALPAGTSAQRAQLIALTQALKMAEGKKLNVYTNSRYAFATAHWHGEIYRRRGLLTSEGKEIKNKDEILALLKALFLPKRLSIIHCPGHQKGHSAEARGNRMADQAARKAAITETPDTSTLLIENSSPYTSEHF

SEQ ID NO: 395 - protein, 704 aa, synthetic construct
  REGION 1..20
MGSSHHHHHHSSGLVPRGSHMTLNIEDEHRLHETSKEPDVSLGSTWLSDFPQAWAETGGMGLAVRQAPLIIPLKATSTPVSIKQYPMSREARLGIKPHIRRLYDQGILVPCQSPWNTPLRPVKKPGTNDYRPVQDLREVNKRVEDIHPTVPNPYNLLSGLPPSHQWYTVLDLKDAFFCLRLHPTSQPLFAFEWRDPEMGISGQLTWTRLPQGFKNSPTLFDEALHRDLADFRIQHPDLILLQYVDDLLLAATSELDCQQGTRALLQTLGNLGYRASAKKAQICQKQVKYLGYLLKEGQRWITDARKETVMGQPTPKTPRELREFLGKAGFCRLWIPGFAEMAAPLYPLTKTGTEFNWGPDQQKAYQEIKQALLTAPALGLPDLTKPFELFVDEKQGYAKGVLTQKLGPWRRPVAYLSKKLDPVAAGWPPCLRMVAAIAVLTKDAGKLTMGQPLTILAPHAVEALVKQPPDRWLSNARMTHYQALLLDTDRVQFGPVVALNPATLLPLPEEGLQHNCLDILAEAHGTRPDLTDQPLPDADHTWYTGGSSLLQEGQRKAGAAVTTETEVIWAKALPAGTSAQRAQLIALTQALKMAEGKKLNVYTNSRYAFATAHWHGEIYRRRGLLTSEGKEIKNKDEILALLKALFLPKRLSIIHCPGHQKGHSAEARGNRMADQAARKAAITETPDTSTLLIENSSPYTSEHF

SEQ ID NO: 396 - protein, 704 aa, synthetic construct; identical to SEQ ID NO: 277
  REGION 1..20

SEQ ID NO: 397 - protein, 522 aa, synthetic construct
  REGION 1..20
MGSSHHHHHHSSGLVPRGSHMTLNIEDEHRLHETSKEPDVSLGSTWLSDFPQAWAETGGMGLAVRQAPLIIPLKATSTPVSIKQYPMSREARLGIKPHIRRLYDQGILVPCQSPWNTPLRPVKKPGTNDYRPVQDLREVNKRVEDIHPTVPNPYNLLSGLPPSHQWYTVLDLKDAFFCLRLHPTSQPLFAFEWRDPEMGISGQLTWTRLPQGFKNSPTLFDEALHRDLADFRIQHPDLILLQYVDDLLLAATSELDCQQGTRALLQTLGNLGYRASAKKAQICQKQVKYLGYLLKEGQRWITDARKETVMGQPTPKTPRELREFLGKAGFCRLWIPGFAEMAAPLYPLTKTGTEFNWGPDQQKAYQEIKQALLTAPALGLPDLTKPFELFVDEKQGYAKGVLTQKLGPWRRPVAYLSKKLDPVAAGWPPCLRMVAAIAVLTKDAGKLTMGQPLNILAPHAVEALVKQPPDRWLSNARMTHYQALLLDTDRVQFGPVVALNPATLLPLPEEGLQHNCLDILAE

SEQ ID NO: 398 - protein, 704 aa, synthetic construct
  REGION 1..20
MGSSHHHHHHSSGLVPRGSHMTLNIEDEHRLHETSKEPDVSLGSTWLSDFPQAWAETGGMGLAVRQAPLIIPLKATSTPVSIKQYPMSREARLGIKPHIRRLYDQGILVPCQSPWNTPLRPVKKPGTNDYRPVQDLREVNKRVEDIHPTVPNPYNLLSGLPPSHQWYTVLDLKDAFFCLRLHPTSQPLFAFEWRDPEMGISGQLTWTRLPQGFKNSPTLFDEALHRDLADFRIQHPDLILLQYVDDLLLAATSELDCQQGTRALLQTLGNLGYRASAKKAQICQKQVKYLGYLLKEGQRWITDARKETVMGQPTPKTPRELREFLGKAGFCRLWIPGFAEMAAPLYPLTKTGTEFNWGPDQQKAYQEIKQALLTAPALGLPDLTKPFELFVDEKQGYAKGVLTQKLGPWRRPVAYLSKKLDPVAAGWPPCLRMVAAIAVLTKDAGKLTMGQPLNILAPHAVEALVKQPPDRWLSNARMTHYQALLLDTDRVQFGPVVALNPATLLPLPEEGLQHNCLDILAEAHGTRPDLTDQPLPDADHTWYTGGSSYLQEGQRKAGAAVTTETEVIWAKALPAGTSAQRAQLIALTQALKMAEGKKLNVYTNSRYAFATAHWHGEIYRRRGLLTSEGKEIKNKDEILALLKALFLPKRLSIIHCPGHQKGHSAEARGNRMADQAARKAAITETPDTSTLLIENSSPYTSEHF

SEQ ID NO: 399 - protein, 704 aa, synthetic construct
  REGION 1..20
MGSSHHHHHHSSGLVPRGSHMTLNIEDEHRLHETSKEPDVSLGSTWLSDFPQAWAETGGMGLAVRQAPLIIPLKATSTPVSIKQYPMSREARLGIKPHIRRLYDQGILVPCQSPWNTPLRPVKKPGTNDYRPVQDLREVNKRVEDIHPTVPNPYNLLSGLPPSHQWYTVLDLKDAFFCLRLHPTSQPLFAFEWRDPEMGISGQLTWTRLPQGFKNSPTLFDEALHRDLADFRIQHPDLILLQYVDDLLLAATSELDCQQGTRALLQTLGNLGYRASAKKAQICQKQVKYLGYLLKEGQRWITDARKETVMGQPTPKTPRELREFLGKAGFCRLWIPGFAEMAAPLYPLTKTGTLFNWGPDQQKAYQEIKQALLTAPALGLPDLTKPFELFVDEKQGYAKGVLTQKLGPWRRPVAYLSKKLDPVAAGWPPCLRMVAAIAVLTKDAGKLTMGQPLTIHAPHAVEALVKQPPDRWLSNARMTHYQALLLDTDRVQFGPVVALNPATLLPLPEEGLQHNCLDILAEAHGTRPDLTDQPLPDADHTWYTGGSSLLQEGQRKAGAAVTTETEVIWAKALPAGTSAQRAQLIALTQALKMAEGKKLNVYTNSRYAFATAHWHGEIYRRRGLLTSEGKEIKNKDEILALLKALFLPKRLSIIHCPGHQKGHSAEARGNRMADQAARKAAITETPDTSTLLIENSSPYTSEHF

SEQ ID NO: 400 - protein, 704 aa, synthetic construct
  REGION 1..20
MGSSHHHHHHSSGLVPRGSHMTLNIEDEHRLHETSKEPDVSLGSTWLSDFPQAWAETGGMGLAVRQAPLIIPLKATSTPVSIKQYPMSREARLGIKPHIRRLYDQGILVPCQSPWNTPLRPVKKPGTNDYRPVQDLREVNKRVEDIHPTVPNPYNLLSGLPPSHQWYTVLDLKDAFFCLRLHPTSQPLFAFEWRDPEMGISGQLTWTRLPQGFKNSPTLFDEALHRDLADFRIQHPDLILLQYVDDLLLAATSELDCQQGTRALLQTLGNLGYRASAKKAQICQKQVKYLGYLLKEGQRWITDARKETVMGQPTPKTPRELREFLGKAGFCRLWIPGFAEMAAPLYPLTKTGTLFNWGPDQQKAYQEIKQALLTAPALGLPDLTKPFELFVDEKQGYAKGVLTQKLGPWRRPVAYLSKKLDPVAAGWPPCLRMVAAIAVLTKDAGKLTMGQPLTILAPHAVEALVKQPPDRWLSNARMTHYQALLLDNDRVQFGPVVALNPATLLPLPEEGLQHNCLDILAEAHGTRPDLTDQPLPDADHTWYTGGSSLLQEGQRKAGAAVTTETEVIWAKALPAGTSAQRAQLIALTQALKMAEGKKLNVYTNSRYAFATAHWHGEIYRRRGLLTSEGKEIKNKDEILALLKALFLPKRLSIIHCPGHQKGHSAEARGNRMADQAARKAAITETPDTSTLLIENSSPYTSEHF

SEQ ID NO: 401 - protein, 704 aa, synthetic construct
  REGION 1..20
MGSSHHHHHHSSGLVPRGSHMTLNIEDEHRLHETSKEPDVSLGSTWLSDFPQAWAETGGMGLAVRQAPLIIPLKATSTPVSIKQYPMSREARLGIKPHIRRLYDQGILVPCQSPWNTPLRPVKKPGTNDYRPVQDLREVNKRVEDIHPTVPNPYNLLSGLPPSHQWYTVLDLKDAFFCLRLHPTSQPLFAFEWRDPEMGISGQLTWTRLPQGFKNSPTLFDEALHRDLADFRIQHPDLILLQYVDDLLLAATSELDCQQGTRALLQTLGNLGYRASAKKAQICQKQVKYLGYLLKEGQRWITDARKETVMGQPTPKTPRELREFLGKAGFCRLWIPGFAEMAAPLYPLTKTGTLFNWGPDQQKAYQEIKQALLTAPALGLPDLTKPFELFVDEKQGYAKGVLTQKLGPWRRPVAYLSKKLDPVAAGWPPCLRMVAAIAVLTKDAGKLTMGQPLTILAPHAVEALVKQPPDRWLSNARMTHYQALLLDTDRVQFGPVVALNPATLLPLPEEALQHNCLDILAEAHGTRPDLTDQPLPDADHTWYTGGSSLLQEGQRKAGAAVTTETEVIWAKALPAGTSAQRAQLIALTQALKMAEGKKLNVYTNSRYAFATAHWHGEIYRRRGLLTSEGKEIKNKDEILALLKALFLPKRLSIIHCPGHQKGHSAEARGNRMADQAARKAAITETPDTSTLLIENSSPYTSEHF

SEQ ID NO: 402 - protein, 522 aa, synthetic construct
  REGION 1..20
MGSSHHHHHHSSGLVPRGSHMTLNIEDEHRLHETSKEPDVSLGSTWLSDFPQAWAETGGMGLAVRQAPLIIPLKATSTPVSIKQYPMSREARLGIKPHIRRLYDQGILVPCQSPWNTPLRPVKKPGTNDYRPVQDLREVNKRVEDIHPTVPNPYNLLSGLPPSHQWYTVLDLKDAFFCLRLHPTSQPLFAFEWRDPEMGISGQLTWTRLPQGFKNSPTLFDEALHRDLADFRIQHPDLILLQYVDDLLLAATSELDCQQGTRALLQTLGNLGYRASAKKAQICQKQVKYLGYLLKEGQRWITDARKETVMGQPTPKTPRELREFLGKAGFCRLWIPGFAEMAAPLYPLTKTGTLFNWGPDQQKAYQEIKQALLTAPALGLPDLTKPFELFVDEKQGYAKGVLTQKLGPWRRPVAYLSKKLDPVAAGWPPCLRMVAAIAVLTKDAGKLTMGQPLTILAPHAVEALVKQPPDRWLSNARMTHYQALLLDTDRVQFGPVVALNPATLLPLPEEGLQHNCLDILAE

SEQ ID NO: 403 - protein, 704 aa, synthetic construct
  REGION 1..20
MGSSHHHHHHSSGLVPRGSHMTLNIEDEHRLHETSKEPDVSLGSTWLSDFPQAWAETGGMGLAVRQAPLIIPLKATSTPVSIKQYPMSREARLGIKPHIRRLYDQGILVPCQSPWNTPLRPVKKPGTNDYRPVQDLREVNKRVEDIHPTVPNPYNLLSGLPPSHQWYTVLDLKDAFFCLRLHPTSQPLFAFEWRDPEMGISGQLTWTRLPQGFKNSPTLFDEALHRDLADFRIQHPDLILLQYVDDLLLAATSELDCQQGTRALLQTLGNLGYRASAKKAQICQKQVKYLGYLLKEGQRWITDARKETVMGQPTPKTPRELREFLGKAGFCRLWIPGFAEMAAPLYPLTKTGTLFNWGPDQQKAYQEIKQALLTAPALGLPDLTKPFELFVDEKQGYAKGVLTQKLGPWRRPVAYLSKKLDPVAAGWPPCLRMVAAIAVLTKDAGKLTMGQPLTILAPHAVEALVKQPPDRWLSNARMTHYQALLLDTDRVQFGPVVALNPATLLPLPEEGLQHNCLDILAEAHGTRPDLTDQPLPDADHTWYTGGSSYLQEGQRKAGAAVTTETEVIWAKALPAGTSAQRAQLIALTQALKMAEGKKLNVYTNSRYAFATAHWHGEIYRRRGLLTSEGKEIKNKDEILALLKALFLPKRLSIIHCPGHQKGHSAEARGNRMADQAARKAAITETPDTSTLLIENSSPYTSEHF

SEQ ID NO: 404 - protein, 704 aa, synthetic construct
  REGION 1..20
MGSSHHHHHHSSGLVPRGSHMTLNIEDEHRLHETSKEPDVSLGSTWLSDFPQAWAETGGMGLAVRQAPLIIPLKATSTPVSIKQYPMSREARLGIKPHIRRLYDQGILVPCQSPWNTPLRPVKKPGTNDYRPVQDLREVNKRVEDIHPTVPNPYNLLSGLPPSHQWYTVLDLKDAFFCLRLHPTSQPLFAFEWRDPEMGISGQLTWTRLPQGFKNSPTLFDEALHRDLADFRIQHPDLILLQYVDDLLLAATSELDCQQGTRALLQTLGNLGYRASAKKAQICQKQVKYLGYLLKEGQRWITDARKETVMGQPTPKTPRELREFLGKAGFCRLWIPGFAEMAAPLYPLTKTGTLFNWGPDQQKAYQEIKQALLTAPALGLPDLTKPFELFVDEKQGYAKGVLTQKLGPWRRPVAYLSKKLDPVAAGWPPCLRMVAAIAVLTKDAGKLTMGQPLTILAPHAVEALVKQPPDRWLSNARMTHYQALLLDTDRVQFGPVVALNPATLLPLPEEGLQHNCLDILAEAHGTRPDLTDQPLPDADHTWYTGGSSLLQEGQRKAGAAVTTETEVIWAKALPAGTSAQRAQLIALTQALKMAEGKKLNVYTNSRYAFATAHWHGEIYRRRGLLTSEGKEIKNKDEILALLKALFLPKMLSIIHCPGHQKGHSAEARGNRMADQAARKAAITETPDTSTLLIENSSPYTSEHF

SEQ ID NO: 405 - protein, 704 aa, synthetic construct
  REGION 1..20
MGSSHHHHHHSSGLVPRGSHMTLNIEDEHRLHETSKEPDVSLGSTWLSDFPQAWAETGGMGLAVRQAPLIIPLKATSTPVSIKQYPMSREARLGIKPHIRRLYDQGILVPCQSPWNTPLRPVKKPGTNDYRPVQDLREVNKRVEDIHPTVPNPYNLLSGLPPSHQWYTVLDLKDAFFCLRLHPTSQPLFAFEWRDPEMGISGQLTWTRLPQGFKNSPTLFDEALHRDLADFRIQHPDLILLQYVDDLLLAATSELDCQQGTRALLQTLGNLGYRASAKKAQICQKQVKYLGYLLKEGQRWITDARKETVMGQPTPKTPRELREFLGKAGFCRLWIPGFAEMAAPLYPLTKTGTLFNWGPDQQKAYQEIKQALLTAPALGLPDLTKPFELFVDEKQGYAKGVLTQKLGPWRRPVAYLSKKLDPVAAGWPPCLRMVAAIAVLTKDAGKLTMGQPLTILAPHAVEALVKQPPDRWLSNARMTHYQALLLDTDRVQFGPVVALNPATLLPLPEEGLQHNCLDILAEAHGTRPDLTDQPLPDADHTWYTGGSSLLQEGQRKAGAAVTTETEVIWAKALPAGTSAQRAQLIALTQALKMAEGKKLNVYTNSRYAFATAHWHGEIYRRRGLLTSEGKEIKNKDEILALLKALFLPKRLSIIHCPGHQKGHSAEVRGNRMADQAARKAAITETPDTSTLLIENSSPYTSEHF

SEQ ID NO: 406 - protein, 704 aa, synthetic construct
  REGION 1..20
MGSSHHHHHHSSGLVPRGSHMTLNIEDEHRLHETSKEPDVSLGSTWLSDFPQAWAETGGMGLAVRQAPLIIPLKATSTPVSIKQYPMSREARLGIKPHIRRLYDQGILVPCQSPWNTPLRPVKKPGTNDYRPVQDLREVNKRVEDIHPTVPNPYNLLSGLPPSHQWYTVLDLKDAFFCLRLHPTSQPLFAFEWRDPEMGISGQLTWTRLPQGFKNSPTLFDEALHRDLADFRIQHPDLILLQYVDDLLLAATSELDCQQGTRALLQTLGNLGYRASAKKAQICQKQVKYLGYLLKEGQRWITDARKETVMGQPTPKTPRELREFLGKAGFCRLWIPGFAEMAAPLYPLTKTGTLFNWGPDQQKAYQEIKQALLTAPALGLPDLTKPFELFVDEKQGYAKGVLTQKLGPWRRPVAYLSKKLDPVAAGWPPCLRMVAAIAVLTKDAGKLTMGQPLNIHAPHAVEALVKQPPDRWLSNARMTHYQALLLDNDRVQFGPVVALNPATLLPLPEEGLQHNCLDILAEAHGTRPDLTDQPLPDADHTWYTGGSSLLQEGQRKAGAAVTTETEVIWAKALPAGTSAQRAQLIALTQALKMAEGKKLNVYTNSRYAFATAHWHGEIYRRRGLLTSEGKEIKNKDEILALLKALFLPKRLSIIHCPGHQKGHSAEARGNRMADQAARKAAITETPDTSTLLIENSSPYTSEHF

SEQ ID NO: 407 - protein, 522 aa, synthetic construct
  REGION 1..20
MGSSHHHHHHSSGLVPRGSHMTLNIEDEHRLHETSKEPDVSLGSTWLSDFPQAWAETGGMGLAVRQAPLIIPLKATSTPVSIKQYPMSREARLGIKPHIRRLYDQGILVPCQSPWNTPLRPVKKPGTNDYRPVQDLREVNKRVEDIHPTVPNPYNLLSGLPPSHQWYTVLDLKDAFFCLRLHPTSQPLFAFEWRDPEMGISGQLTWTRLPQGFKNSPTLFDEALHRDLADFRIQHPDLILLQYVDDLLLAATSELDCQQGTRALLQTLGNLGYRASAKKAQICQKQVKYLGYLLKEGQRWITDARKETVMGQPTPKTPRELREFLGKAGFCRLWIPGFAEMAAPLYPLTKTGTLFNWGPDQQKAYQEIKQALLTAPALGLPDLTKPFELFVDEKQGYAKGVLTQKLGPWRRPVAYLSKKLDPVAAGWPPCLRMVAAIAVLTKDAGKLTMGQPLNIHAPHAVEALVKQPPDRWLSNARMTHYQALLLDTDRVQFGPVVALNPATLLPLPEEGLQHNCLDILAE

SEQ ID NO: 408 - protein, 704 aa, synthetic construct
  REGION 1..20
MGSSHHHHHHSSGLVPRGSHMTLNIEDEHRLHETSKEPDVSLGSTWLSDFPQAWAETGGMGLAVRQAPLIIPLKATSTPVSIKQYPMSREARLGIKPHIRRLYDQGILVPCQSPWNTPLRPVKKPGTNDYRPVQDLREVNKRVEDIHPTVPNPYNLLSGLPPSHQWYTVLDLKDAFFCLRLHPTSQPLFAFEWRDPEMGISGQLTWTRLPQGFKNSPTLFDEALHRDLADFRIQHPDLILLQYVDDLLLAATSELDCQQGTRALLQTLGNLGYRASAKKAQICQKQVKYLGYLLKEGQRWITDARKETVMGQPTPKTPRELREFLGKAGFCRLWIPGFAEMAAPLYPLTKTGTLFNWGPDQQKAYQEIKQALLTAPALGLPDLTKPFELFVDEKQGYAKGVLTQKLGPWRRPVAYLSKKLDPVAAGWPPCLRMVAAIAVLTKDAGKLTMGQPLNIHAPHAVEALVKQPPDRWLSNARMTHYQALLLDTDRVQFGPVVALNPATLLPLPEEGLQHNCLDILAEAHGTRPDLTDQPLPDADHTWYTGGSSYLQEGQRKAGAAVTTETEVIWAKALPAGTSAQRAQLIALTQALKMAEGKKLNVYTNSRYAFATAHWHGEIYRRRGLLTSEGKEIKNKDEILALLKALFLPKRLSIIHCPGHQKGHSAEARGNRMADQAARKAAITETPDTSTLLIENSSPYTSEHF

SEQ ID NO: 409 - protein, 704 aa, synthetic construct
  REGION 1..20
MGSSHHHHHHSSGLVPRGSHMTLNIEDEHRLHETSKEPDVSLGSTWLSDFPQAWAETGGMGLAVRQAPLIIPLKATSTPVSIKQYPMSREARLGIKPHIRRLYDQGILVPCQSPWNTPLRPVKKPGTNDYRPVQDLREVNKRVEDIHPTVPNPYNLLSGLPPSHQWYTVLDLKDAFFCLRLHPTSQPLFAFEWRDPEMGISGQLTWTRLPQGFKNSPTLFDEALHRDLADFRIQHPDLILLQYVDDLLLAATSELDCQQGTRALLQTLGNLGYRASAKKAQICQKQVKYLGYLLKEGQRWITDARKETVMGQPTPKTPRELREFLGKAGFCRLWIPGFAEMAAPLYPLTKTGTLFNWGPDQQKAYQEIKQALLTAPALGLPDLTKPFELFVDEKQGYAKGVLTQKLGPWRRPVAYLSKKLDPVAAGWPPCLRMVAAIAVLTKDAGKLTMGQPLNILAPHAVEALVKQPPDRWLSNARMTHYQALLLDNDRVQFGPVVALNPATLLPLPEEALQHNCLDILAEAHGTRPDLTDQPLPDADHTWYTGGSSLLQEGQRKAGAAVTTETEVIWAKALPAGTSAQRAQLIALTQALKMAEGKKLNVYTNSRYAFATAHWHGEIYRRRGLLTSEGKEIKNKDEILALLKALFLPKRLSIIHCPGHQKGHSAEARGNRMADQAARKAAITETPDTSTLLIENSSPYTSEHF

SEQ ID NO: 410 - protein, 522 aa, synthetic construct
  REGION 1..20
MGSSHHHHHHSSGLVPRGSHMTLNIEDEHRLHETSKEPDVSLGSTWLSDFPQAWAETGGMGLAVRQAPLIIPLKATSTPVSIKQYPMSREARLGIKPHIRRLYDQGILVPCQSPWNTPLRPVKKPGTNDYRPVQDLREVNKRVEDIHPTVPNPYNLLSGLPPSHQWYTVLDLKDAFFCLRLHPTSQPLFAFEWRDPEMGISGQLTWTRLPQGFKNSPTLFDEALHRDLADFRIQHPDLILLQYVDDLLLAATSELDCQQGTRALLQTLGNLGYRASAKKAQICQKQVKYLGYLLKEGQRWITDARKETVMGQPTPKTPRELREFLGKAGFCRLWIPGFAEMAAPLYPLTKTGTLFNWGPDQQKAYQEIKQALLTAPALGLPDLTKPFELFVDEKQGYAKGVLTQKLGPWRRPVAYLSKKLDPVAAGWPPCLRMVAAIAVLTKDAGKLTMGQPLNILAPHAVEALVKQPPDRWLSNARMTHYQALLLDNDRVQFGPVVALNPATLLPLPEEGLQHNCLDILAE

SEQ ID NO: 411 - protein, 704 aa, synthetic construct
  REGION 1..20
MGSSHHHHHHSSGLVPRGSHMTLNIEDEHRLHETSKEPDVSLGSTWLSDFPQAWAETGGMGLAVRQAPLIIPLKATSTPVSIKQYPMSREARLGIKPHIRRLYDQGILVPCQSPWNTPLRPVKKPGTNDYRPVQDLREVNKRVEDIHPTVPNPYNLLSGLPPSHQWYTVLDLKDAFFCLRLHPTSQPLFAFEWRDPEMGISGQLTWTRLPQGFKNSPTLFDEALHRDLADFRIQHPDLILLQYVDDLLLAATSELDCQQGTRALLQTLGNLGYRASAKKAQICQKQVKYLGYLLKEGQRWITDARKETVMGQPTPKTPRELREFLGKAGFCRLWIPGFAEMAAPLYPLTKTGTLFNWGPDQQKAYQEIKQALLTAPALGLPDLTKPFELFVDEKQGYAKGVLTQKLGPWRRPVAYLSKKLDPVAAGWPPCLRMVAAIAVLTKDAGKLTMGQPLNILAPHAVEALVKQPPDRWLSNARMTHYQALLLDNDRVQFGPVVALNPATLLPLPEEGLQHNCLDILAEAHGTRPDLTDQPLPDADHTWYTGGSSYLQEGQRKAGAAVTTETEVIWAKALPAGTSAQRAQLIALTQALKMAEGKKLNVYTNSRYAFATAHWHGEIYRRRGLLTSEGKEIKNKDEILALLKALFLPKRLSIIHCPGHQKGHSAEARGNRMADQAARKAAITETPDTSTLLIENSSPYTSEHF

SEQ ID NO: 412 - protein, 704 aa, synthetic construct
  REGION 1..20
MGSSHHHHHHSSGLVPRGSHMTLNIEDEHRLHETSKEPDVSLGSTWLSDFPQAWAETGGMGLAVRQAPLIIPLKATSTPVSIKQYPMSREARLGIKPHIRRLYDQGILVPCQSPWNTPLRPVKKPGTNDYRPVQDLREVNKRVEDIHPTVPNPYNLLSGLPPSHQWYTVLDLKDAFFCLRLHPTSQPLFAFEWRDPEMGISGQLTWTRLPQGFKNSPTLFDEALHRDLADFRIQHPDLILLQYVDDLLLAATSELDCQQGTRALLQTLGNLGYRASAKKAQICQKQVKYLGYLLKEGQRWITDARKETVMGQPTPKTPRELREFLGKAGFCRLWIPGFAEMAAPLYPLTKTGTLFNWGPDQQKAYQEIKQALLTAPALGLPDLTKPFELFVDEKQGYAKGVLTQKLGPWRRPVAYLSKKLDPVAAGWPPCLRMVAAIAVLTKDAGKLTMGQPLNILAPHAVEALVKQPPDRWLSNARMTHYQALLLDNDRVQFGPVVALNPATLLPLPEEGLQHNCLDILAEAHGTRPDLTDQPLPDADHTWYTGGSSLLQEGQRKAGAAVTTETEVIWAKALPAGTSAQRAQLIALTQALKMAEGKKLNVYTNSRYAFATAHWHGEIYRRRGLLTSEGKEIKNKDEILALLKALFLPKMLSIIHCPGHQKGHSAEARGNRMADQAARKAAITETPDTSTLLIENSSPYTSEHF

SEQ ID NO: 413 - protein, 704 aa, synthetic construct
  REGION 1..20
MGSSHHHHHHSSGLVPRGSHMTLNIEDEHRLHETSKEPDVSLGSTWLSDFPQAWAETGGMGLAVRQAPLIIPLKATSTPVSIKQYPMSREARLGIKPHIRRLYDQGILVPCQSPWNTPLRPVKKPGTNDYRPVQDLREVNKRVEDIHPTVPNPYNLLSGLPPSHQWYTVLDLKDAFFCLRLHPTSQPLFAFEWRDPEMGISGQLTWTRLPQGFKNSPTLFDEALHRDLADFRIQHPDLILLQYVDDLLLAATSELDCQQGTRALLQTLGNLGYRASAKKAQICQKQVKYLGYLLKEGQRWITDARKETVMGQPTPKTPRELREFLGKAGFCRLWIPGFAEMAAPLYPLTKTGTLFNWGPDQQKAYQEIKQALLTAPALGLPDLTKPFELFVDEKQGYAKGVLTQKLGPWRRPVAYLSKKLDPVAAGWPPCLRMVAAIAVLTKDAGKLTMGQPLNILAPHAVEALVKQPPDRWLSNARMTHYQALLLDNDRVQFGPVVALNPATLLPLPEEGLQHNCLDILAEAHGTRPDLTDQPLPDADHTWYTGGSSLLQEGQRKAGAAVTTETEVIWAKALPAGTSAQRAQLIALTQALKMAEGKKLNVYTNSRYAFATAHWHGEIYRRRGLLTSEGKEIKNKDEILALLKALFLPKRLSIIHCPGHQKGHSAEVRGNRMADQAARKAAITETPDTSTLLIENSSPYTSEHF

SEQ ID NO: 414 - protein, 522 aa, synthetic construct
  REGION 1..20
MGSSHHHHHHSSGLVPRGSHMTLNIEDEHRLHETSKEPDVSLGSTWLSDFPQAWAETGGMGLAVRQAPLIIPLKATSTPVSIKQYPMSREARLGIKPHIRRLYDQGILVPCQSPWNTPLRPVKKPGTNDYRPVQDLREVNKRVEDIHPTVPNPYNLLSGLPPSHQWYTVLDLKDAFFCLRLHPTSQPLFAFEWRDPEMGISGQLTWTRLPQGFKNSPTLFDEALHRDLADFRIQHPDLILLQYVDDLLLAATSELDCQQGTRALLQTLGNLGYRASAKKAQICQKQVKYLGYLLKEGQRWITDARKETVMGQPTPKTPRELREFLGKAGFCRLWIPGFAEMAAPLYPLTKTGTLFNWGPDQQKAYQEIKQALLTAPALGLPDLTKPFELFVDEKQGYAKGVLTQKLGPWRRPVAYLSKKLDPVAAGWPPCLRMVAAIAVLTKDAGKLTMGQPLNILAPHAVEALVKQPPDRWLSNARMTHYQALLLDTDRVQFGPVVALNPATLLPLPEEALQHNCLDILAE

SEQ ID NO: 415 - protein, 704 aa, synthetic construct
  REGION 1..20
MGSSHHHHHHSSGLVPRGSHMTLNIEDEHRLHETSKEPDVSLGSTWLSDFPQAWAETGGMGLAVRQAPLIIPLKATSTPVSIKQYPMSREARLGIKPHIRRLYDQGILVPCQSPWNTPLRPVKKPGTNDYRPVQDLREVNKRVEDIHPTVPNPYNLLSGLPPSHQWYTVLDLKDAFFCLRLHPTSQPLFAFEWRDPEMGISGQLTWTRLPQGFKNSPTLFDEALHRDLADFRIQHPDLILLQYVDDLLLAATSELDCQQGTRALLQTLGNLGYRASAKKAQICQKQVKYLGYLLKEGQRWITDARKETVMGQPTPKTPRELREFLGKAGFCRLWIPGFAEMAAPLYPLTKTGTLFNWGPDQQKAYQEIKQALLTAPALGLPDLTKPFELFVDEKQGYAKGVLTQKLGPWRRPVAYLSKKLDPVAAGWPPCLRMVAAIAVLTKDAGKLTMGQPLNILAPHAVEALVKQPPDRWLSNARMTHYQALLLDTDRVQFGPVVALNPATLLPLPEEALQHNCLDILAEAHGTRPDLTDQPLPDADHTWYTGGSSYLQEGQRKAGAAVTTETEVIWAKALPAGTSAQRAQLIALTQALKMAEGKKLNVYTNSRYAFATAHWHGEIYRRRGLLTSEGKEIKNKDEILALLKALFLPKRLSIIHCPGHQKGHSAEARGNRMADQAARKAAITETPDTSTLLIENSSPYTSEHF

SEQ ID NO: 416 - protein, 704 aa, synthetic construct
  REGION 1..20
MGSSHHHHHHSSGLVPRGSHMTLNIEDEHRLHETSKEPDVSLGSTWLSDFPQAWAETGGMGLAVRQAPLIIPLKATSTPVSIKQYPMSREARLGIKPHIRRLYDQGILVPCQSPWNTPLRPVKKPGTNDYRPVQDLREVNKRVEDIHPTVPNPYNLLSGLPPSHQWYTVLDLKDAFFCLRLHPTSQPLFAFEWRDPEMGISGQLTWTRLPQGFKNSPTLFDEALHRDLADFRIQHPDLILLQYVDDLLLAATSELDCQQGTRALLQTLGNLGYRASAKKAQICQKQVKYLGYLLKEGQRWITDARKETVMGQPTPKTPRELREFLGKAGFCRLWIPGFAEMAAPLYPLTKTGTLFNWGPDQQKAYQEIKQALLTAPALGLPDLTKPFELFVDEKQGYAKGVLTQKLGPWRRPVAYLSKKLDPVAAGWPPCLRMVAAIAVLTKDAGKLTMGQPLNILAPHAVEALVKQPPDRWLSNARMTHYQALLLDTDRVQFGPVVALNPATLLPLPEEGLQHNCLDILAEAHGTRPDLTDQPLPDADHTWYTGGSSYLQEGQRKAGAAVTTETEVIWAKALPAGTSAQRAQLIALTQALKMAEGKKLNVYTNSRYAFATAHWHGEIYRRRGLLTSEGKEIKNKDEILALLKALFLPKMLSIIHCPGHQKGHSAEARGNRMADQAARKAAITETPDTSTLLIENSSPYTSEHF

SEQ ID NO: 417 - protein, 704 aa, synthetic construct
  REGION 1..20
MGSSHHHHHHSSGLVPRGSHMTLNIEDEHRLHETSKEPDVSLGSTWLSDFPQAWAETGGMGLAVRQAPLIIPLKATSTPVSIKQYPMSREARLGIKPHIRRLYDQGILVPCQSPWNTPLRPVKKPGTNDYRPVQDLREVNKRVEDIHPTVPNPYNLLSGLPPSHQWYTVLDLKDAFFCLRLHPTSQPLFAFEWRDPEMGISGQLTWTRLPQGFKNSPTLFDEALHRDLADFRIQHPDLILLQYVDDLLLAATSELDCQQGTRALLQTLGNLGYRASAKKAQICQKQVKYLGYLLKEGQRWITDARKETVMGQPTPKTPRELREFLGKAGFCRLWIPGFAEMAAPLYPLTKTGTLFNWGPDQQKAYQEIKQALLTAPALGLPDLTKPFELFVDEKQGYAKGVLTQKLGPWRRPVAYLSKKLDPVAAGWPPCLRMVAAIAVLTKDAGKLTMGQPLNILAPHAVEALVKQPPDRWLSNARMTHYQALLLDTDRVQFGPVVALNPATLLPLPEEGLQHNCLDILAEAHGTRPDLTDQPLPDADHTWYTGGSSYLQEGQRKAGAAVTTETEVIWAKALPAGTSAQRAQLIALTQALKMAEGKKLNVYTNSRYAFATAHWHGEIYRRRGLLTSEGKEIKNKDEILALLKALFLPKRLSIIHCPGHQKGHSAEVRGNRMADQAARKAAITETPDTSTLLIENSSPYTSEHF

SEQ ID NO: 418 - protein, 704 aa, synthetic construct
  REGION 1..20
MGSSHHHHHHSSGLVPRGSHMTLNIEDEHALHETSKEPDVSLGSTWLSDFPQAWAETGGMGLAVRQAPLIIPLKATSTPVSIKQYPMSREARLGIKPHIRRLYDQGILVPCQSPWNTPLRPVKKPGTNDYRPVQDLREVNKRVEDIHPTVPNPYNLLSGLPPSHQWYTVLDLKDAFFCLRLHPTSQPLFAFEWRDPEMGISGQLTWTRLPQGFKNSPTLFDEALHRDLADFRIQHPDLILLQYVDDLLLAATSELDCQQGTRALLQTLGNLGYRASAKKAQICQKQVKYLGYLLKEGQRWITDARKEDVMGQPTPKTPRELREFLGKAGFCRLWIPGFAEMAAPLYPLTKTGTEFNWGPDQQKAYQEIKQALLTAPALGLPDLTKPFELFVDEKQGYAKGVLTQKLGPWRRPVAYLSKKLDPVAAGWPPCLRMVAAIAVLTKDAGKLTMGQPLNILAPHAVEALVKQPPDRWLSNARMTHYQALLLDTDRVQFGPVVALNPATLLPLPEEGLQHNCLDILAEAHGTRPDLTDQPLPDADHTWYTGGSSLLQEGQRKAGAAVTTETEVIWAKALPAGTSAQRAQLIALTQALKMAEGKKLNVYTNSRYAFATAHWHGEIYRRRGLLTSEGKEIKNKDEILALLKALFLPKRLSIIHCPGHQKGHSAEARGNRMADQAARKAAITETPDTSTLLIENSSPYTSEHF

SEQ ID NO: 419 - protein, 704 aa, synthetic construct
  REGION 1..20
MGSSHHHHHHSSGLVPRGSHMTLNIEDEHRLHETSKEPDVSLGSTWLSDFPQAWAETGGMGLAVRQAPLIIPLKATSTPVSIKQYPMSREARLGIKPHIRRLYDQGILVPCQSPWNTPLRPVKKPGTNDYRPVQDLREVNKRVEDIHPTVPNPYNLLSGLPPSHQWYTVLDLKDAFFALRLHPTSQPLFAFEWRDPEMGISGQLTWTRLPQGFKNSPTLFDEALHRDLADFRIQHPDLILLQYVDDLLLAATSELDCQQGTRALLQTLGNLGYRASAKKAQICQKQVKYLGYLLKEGQRWITDARKEDVMGQPTPKTPRELREFLGKAGFCRLWIPGFAEMAAPLYPLTKTGTEFNWGPDQQKAYQEIKQALLTAPALGLPDLTKPFELFVDEKQGYAKGVLTQKLGPWRRPVAYLSKKLDPVAAGWPPCLRMVAAIAVLTKDAGKLTMGQPLNILAPHAVEALVKQPPDRWLSNARMTHYQALLLDTDRVQFGPVVALNPATLLPLPEEGLQHNCLDILAEAHGTRPDLTDQPLPDADHTWYTGGSSLLQEGQRKAGAAVTTETEVIWAKALPAGTSAQRAQLIALTQALKMAEGKKLNVYTNSRYAFATAHWHGEIYRRRGLLTSEGKEIKNKDEILALLKALFLPKRLSIIHCPGHQKGHSAEARGNRMADQAARKAAITETPDTSTLLIENSSPYTSEHF

SEQ ID NO: 420 - protein, 704 aa, synthetic construct
  REGION 1..20
MGSSHHHHHHSSGLVPRGSHMTLNIEDEHRLHETSKEPDVSLGSTWLSDFPQAWAETGGMGLAVRQAPLIIPLKATSTPVSIKQYPMSREARLGIKPHIRRLYDQGILVPCQSPWNTPLRPVKKPGTNDYRPVQDLREVNKRVEDIHPTVPNPYNLLSGLPPSHQWYTVLDLKDAFFCLRLHPTSQPLFAFEWEDPEMGISGQLTWTRLPQGFKNSPTLFDEALHRDLADFRIQHPDLILLQYVDDLLLAATSELDCQQGTRALLQTLGNLGYRASAKKAQICQKQVKYLGYLLKEGQRWITDARKEDVMGQPTPKTPRELREFLGKAGFCRLWIPGFAEMAAPLYPLTKTGTEFNWGPDQQKAYQEIKQALLTAPALGLPDLTKPFELFVDEKQGYAKGVLTQKLGPWRRPVAYLSKKLDPVAAGWPPCLRMVAAIAVLTKDAGKLTMGQPLNILAPHAVEALVKQPPDRWLSNARMTHYQALLLDTDRVQFGPVVALNPATLLPLPEEGLQHNCLDILAEAHGTRPDLTDQPLPDADHTWYTGGSSLLQEGQRKAGAAVTTETEVIWAKALPAGTSAQRAQLIALTQALKMAEGKKLNVYTNSRYAFATAHWHGEIYRRRGLLTSEGKEIKNKDEILALLKALFLPKRLSIIHCPGHQKGHSAEARGNRMADQAARKAAITETPDTSTLLIENSSPYTSEHF

SEQ ID NO: 421 - protein, 704 aa, synthetic construct
  REGION 1..20
MGSSHHHHHHSSGLVPRGSHMTLNIEDEHRLHETSKEPDVSLGSTWLSDFPQAWAETGGMGLAVRQAPLIIPLKATSTPVSIKQYPMSREARLGIKPHIRRLYDQGILVPCQSPWNTPLRPVKKPGTNDYRPVQDLREVNKRVEDIHPTVPNPYNLLSGLPPSHQWYTVLDLKDAFFCLRLHPTSQPLFAFEWRDPEMGISGQLTWTRLPQGFKNSPTLFDEALHRDLADFRIQHPDLILLQYVDDLLLAATSELDCQQGTRALLQTLGNLGYRASAKKAQICQKQVKYLGYLLKEGQRWITDARKEDVMGQPTPKTPRELREFLGKAGFCRLWIPGFAEMAAPLYPLTKTGTEFNWGPDQQKAYQEIKQALLTAPALGLPDLTKPFELFVDEKQGYAKGVLTQKLGPWRRPVAYLSKKLDPVAAGWPPCLRMVAAIAVLTKDAGKLTMGQPLTILAPHAVEALVKQPPDRWLSNARMTHYQALLLDTDRVQFGPVVALNPATLLPLPEEGLQHNCLDILAEAHGTRPDLTDQPLPDADHTWYTGGSSLLQEGQRKAGAAVTTETEVIWAKALPAGTSAQRAQLIALTQALKMAEGKKLNVYTNSRYAFATAHWHGEIYRRRGLLTSEGKEIKNKDEILALLKALFLPKRLSIIHCPGHQKGHSAEARGNRMADQAARKAAITETPDTSTLLIENSSPYTSEHF

SEQ ID NO: 422 - protein, 704 aa, synthetic construct
  REGION 1..20
MGSSHHHHHHSSGLVPRGSHMTLNIEDEHRLHETSKEPDVSLGSTWLSDFPQAWAETGGMGLAVRQAPLIIPLKATSTPVSIKQYPMSREARLGIKPHIRRLYDQGILVPCQSPWNTPLRPVKKPGTNDYRPVQDLREVNKRVEDIHPTVPNPYNLLSGLPPSHQWYTVLDLKDAFFCLRLHPTSQPLFAFEWRDPEMGISGQLTWTRLPQGFKNSPTLFDEALHRDLADFRIQHPDLILLQYVDDLLLAATSELDCQQGTRALLQTLGNLGYRASAKKAQICQKQVKYLGYLLKEGQRWITDARKEDVMGQPTPKTPRELREFLGKAGFCRLWIPGFAEMAAPLYPLTKTGTEFNWGPDQQKAYQEIKQALLTAPALGLPDLTKPFELFVDEKQGYAKGVLTQKLGPWRRPVAYLSKKLDPVAAGWPPCLRMVAAIAVLTKDAGKLTMGQPLNILAPHAVEALVKQPPDRWLSNARMTHYQALLLDNDRVQFGPVVALNPATLLPLPEEGLQHNCLDILAEAHGTRPDLTDQPLPDADHTWYTGGSSLLQEGQRKAGAAVTTETEVIWAKALPAGTSAQRAQLIALTQALKMAEGKKLNVYTNSRYAFATAHWHGEIYRRRGLLTSEGKEIKNKDEILALLKALFLPKRLSIIHCPGHQKGHSAEARGNRMADQAARKAAITETPDTSTLLIENSSPYTSEHF

SEQ ID NO: 423 - protein, 522 aa, synthetic construct
  REGION 1..20
MGSSHHHHHHSSGLVPRGSHMTLNIEDEHRLHETSKEPDVSLGSTWLSDFPQAWAETGGMGLAVRQAPLIIPLKATSTPVSIKQYPMSREARLGIKPHIRRLYDQGILVPCQSPWNTPLRPVKKPGTNDYRPVQDLREVNKRVEDIHPTVPNPYNLLSGLPPSHQWYTVLDLKDAFFCLRLHPTSQPLFAFEWRDPEMGISGQLTWTRLPQGFKNSPTLFDEALHRDLADFRIQHPDLILLQYVDDLLLAATSELDCQQGTRALLQTLGNLGYRASAKKAQICQKQVKYLGYLLKEGQRWITDARKEDVMGQPTPKTPRELREFLGKAGFCRLWIPGFAEMAAPLYPLTKTGTEFNWGPDQQKAYQEIKQALLTAPALGLPDLTKPFELFVDEKQGYAKGVLTQKLGPWRRPVAYLSKKLDPVAAGWPPCLRMVAAIAVLTKDAGKLTMGQPLNILAPHAVEALVKQPPDRWLSNARMTHYQALLLDTDRVQFGPVVALNPATLLPLPEEGLQHNCLDILAE

SEQ ID NO: 424 - protein, 704 aa, synthetic construct
  REGION 1..20
MGSSHHHHHHSSGLVPRGSHMTLNIEDEHRLHETSKEPDVSLGSTWLSDFPQAWAETGGMGLAVRQAPLIIPLKATSTPVSIKQYPMSREARLGIKPHIRRLYDQGILVPCQSPWNTPLRPVKKPGTNDYRPVQDLREVNKRVEDIHPTVPNPYNLLSGLPPSHQWYTVLDLKDAFFCLRLHPTSQPLFAFEWRDPEMGISGQLTWTRLPQGFKNSPTLFDEALHRDLADFRIQHPDLILLQYVDDLLLAATSELDCQQGTRALLQTLGNLGYRASAKKAQICQKQVKYLGYLLKEGQRWITDARKEDVMGQPTPKTPRELREFLGKAGFCRLWIPGFAEMAAPLYPLTKTGTEFNWGPDQQKAYQEIKQALLTAPALGLPDLTKPFELFVDEKQGYAKGVLTQKLGPWRRPVAYLSKKLDPVAAGWPPCLRMVAAIAVLTKDAGKLTMGQPLNILAPHAVEALVKQPPDRWLSNARMTHYQALLLDTDRVQFGPVVALNPATLLPLPEEGLQHNCLDILAEAHGTRPDLTDQPLPDADHTWYTGGSSYLQEGQRKAGAAVTTETEVIWAKALPAGTSAQRAQLIALTQALKMAEGKKLNVYTNSRYAFATAHWHGEIYRRRGLLTSEGKEIKNKDEILALLKALFLPKRLSIIHCPGHQKGHSAEARGNRMADQAARKAAITETPDTSTLLIENSSPYTSEHF

SEQ ID NO: 425 - protein, 704 aa, synthetic construct
  REGION 1..20
MGSSHHHHHHSSGLVPRGSHMTLNIEDEHRLHETSKEPDVSLGSTWLSDFPQAWAETGGMGLAVRQAPLIIPLKATSTPVSIKQYPMSREARLGIKPHIRRLYDQGILVPCQSPWNTPLRPVKKPGTNDYRPVQDLREVNKRVEDIHPTVPNPYNLLSGLPPSHQWYTVLDLKDAFFCLPLHPTSQPLFAFEWRDPEMGISGQLTWTRLPQGFKNSPTLFDEALHRDLADFRIQHPDLILLQYVDDLLLAATSELDCQQGTRALLQTLGNLGYRASAKKAQICQKQVKYLGYLLKEGQRWITDARKETVMGQPTPKTPRELREFLGKAGFCRLWIPGFAEMAAPLYPLTKTGTLFNWGPDQQKAYQEIKQALLTAPALGLPDLTKPFELFVDEKQGYAKGVLTQKLGPWRRPVAYLSKKLDPVAAGWPPCLRMVAAIAVLTKDAGKLTMGQPLNILAPHAVEALVKQPPDRWLSNARMTHYQALLLDTDRVQFGPVVALNPATLLPLPEEGLQHNCLDILAEAHGTRPDLTDQPLPDADHTWYTGGSSLLQEGQRKAGAAVTTETEVIWAKALPAGTSAQRAQLIALTQALKMAEGKKLNVYTNSRYAFATAHWHGEIYRRRGLLTSEGKEIKNKDEILALLKALFLPKRLSIIHCPGHQKGHSAEARGNRMADQAARKAAITETPDTSTLLIENSSPYTSEHF

SEQ ID NO: 426 - protein, 704 aa, synthetic construct
  REGION 1..20
MGSSHHHHHHSSGLVPRGSHMTLNIEDEHRLHETSKEPDVSLGSTWLSDFPQAWAETGGMGLAVRQAPLIIPLKATSTPVSIKQYPMSREARLGIKPHIRRLYDQGILVPCQSPWNTPLRPVKKPGTNDYRPVQDLREVNKRVEDIHPTVPNPYNLLSGLPPSHQWYTVLDLKDAFFCLSLHPTSQPLFAFEWRDPEMGISGQLTWTRLPQGFKNSPTLFDEALHRDLADFRIQHPDLILLQYVDDLLLAATSELDCQQGTRALLQTLGNLGYRASAKKAQICQKQVKYLGYLLKEGQRWITDARKETVMGQPTPKTPRELREFLGKAGFCRLWIPGFAEMAAPLYPLTKTGTLFNWGPDQQKAYQEIKQALLTAPALGLPDLTKPFELFVDEKQGYAKGVLTQKLGPWRRPVAYLSKKLDPVAAGWPPCLRMVAAIAVLTKDAGKLTMGQPLNILAPHAVEALVKQPPDRWLSNARMTHYQALLLDTDRVQFGPVVALNPATLLPLPEEGLQHNCLDILAEAHGTRPDLTDQPLPDADHTWYTGGSSLLQEGQRKAGAAVTTETEVIWAKALPAGTSAQRAQLIALTQALKMAEGKKLNVYTNSRYAFATAHWHGEIYRRRGLLTSEGKEIKNKDEILALLKALFLPKRLSIIHCPGHQKGHSAEARGNRMADQAARKAAITETPDTSTLLIENSSPYTSEHF

SEQ ID NO: 427 - protein, 704 aa, synthetic construct
  REGION 1..20
MGSSHHHHHHSSGLVPRGSHMTLNIEDEHRLHETSKEPDVSLGSTWLSDFPQAWAETGGMGLAVRQAPLIIPLKATSTPVSIKQYPMSREARLGIKPHIRRLYDQGILVPCQSPWNTPLRPVKKPGTNDYRPVQDLREVNKRVEDIHPTVPNPYNLLSGLPPSHQWYTVLDLKDAFFCLRLHPTSQPLFAFEWRDPEMGISGQLTWTRLPQGFKNSPTLFDEALHRDLADFRIQHPDLILLQYVDDLLLAATSELDCQQGTRALLQTLGNLGYRASAKKAQICQKQVKYLGYLLKEGQRWITDARKEDVMGQPTPKTPRELREFLGKAGFCRLWIPGFAEMAAPLYPLTKTGTLFNWGPDQQKAYQEIKQALLTAPALGLPDLTKPFELFVDEKQGYAKGVLTQKLGPWRRPVAYLSKKLDPVAAGWPPCLRMVAAIAVLTKDAGKLTMGQPLNILAPHAVEALVKQPPDRWLSNARMTHYQALLLDTDRVQFGPVVALNPATLLPLPEEGLQHNCLDILAEAHGTRPDLTDQPLPDADHTWYTGGSSLLQEGQRKAGAAVTTETEVIWAKALPAGTSAQRAQLIALTQALKMAEGKKLNVYTNSRYAFATAHWHGEIYRRRGLLTSEGKEIKNKDEILALLKALFLPKRLSIIHCPGHQKGHSAEARGNRMADQAARKAAITETPDTSTLLIENSSPYTSEHF

SEQ ID NO: 428 - protein, 704 aa, synthetic construct
  REGION 1..20
MGSSHHHHHHSSGLVPRGSHMTLNIEDEHRLHETSKEPDVSLGSTWLSDFPQAWAETGGMGLAVRQAPLIIPLKATSTPVSIKQYPMSREARLGIKPHIRRLYDQGILVPCQSPWNTPLRPVKKPGTNDYRPVQDLREVNKRVEDIHPTVPNPYNLLSGLPPSHQWYTVLDLKDAFFCLRLHPTSQPLFAFEWRDPEMGISGQLTWTRLPQGFKNSPTLFDEALHRDLADFRIQHPDLILLQYVDDLLLAATSELDCQQGTRALLQTLGNLGYRASAKKAQICQKQVKYLGYLLKEGQRWITDARKETVMGQPTPKTPRELREFLGKAGFCRLWIPGFAEMAAPLYPLTKTGTEFNWGPDQQKAYQEIKQALLTAPALGLPDLTKPFELFVDEKQGYAKGVLTQKLGPWRRPVAYLSKKLDPVAAGWPPCLRMVAAIAVLTKDAGKLTMGQPLNILAPHAVEALVKQPPDRWLSNARMTHYQALLLDTDRVQFGPVVALNPATLLPLPEEGLQHNCLDILAEAHGTRPDLTDQPLPDADHTWYTGGSSLLQEGQRKAGAAVTTETEVIWAKALPAGTSAQRAQLIALTQALKMAEGKKLNVYTNSRYAFATAHWHGEIYRRRGLLTSEGKEIKNKDEILALLKALFLPKRLSIIHCPGHQKGHSAEARGNRMADQAARKAAITETPDTSTLLIENSSPYTSEHF

SEQ ID NO: 429 - protein, 704 aa, synthetic construct; identical to SEQ ID NO: 311
  REGION 1..20

SEQ ID NO: 430 - protein, 704 aa, synthetic construct
  REGION 1..20
MGSSHHHHHHSSGLVPRGSHMTLNIEDEHRLHETSKEPDVSLGSTWLSDFPQAWAETGGMGLAVRQAPLIIPLKATSTPVSIKQYPMSREARLGIKPHIRRLYDQGILVPCQSPWNTPLRPVKKPGTNDYRPVQDLREVNKRVEDIHPTVPNPYNLLSGLPPSHQWYTVLDLKDAFFCLRLHPTSQPLFAFEWRDPEMGISGQLTWTRLPQGFKNSPTLFDEALHRDLADFRIQHPDLILLQYVDDLLLAATSELDCQQGTRALLQTLGNLGYRASAKKAQICQKQVKYLGYLLKEGQRWITDARKETVMGQPTPKTPRELREFLGKAGFCRLWIPGFAEMAAPLYPLTKTGTLFNWGPDQQKAYQEIKQALLTAPALGLPDLTKPFELFVDEKQGYAKGVLTQKLGPWRRPVAYLSKKLDPVAAGWPPCLRMVAAIAVLTKDAGKLTMGQPLNILAPHAVEALVKQPPDRWLSNARMTHYQALLLDTDRVQFGPVVALNPATLLPLPEEALQHNCLDILAEAHGTRPDLTDQPLPDADHTWYTGGSSLLQEGQRKAGAAVTTETEVIWAKALPAGTSAQRAQLIALTQALKMAEGKKLNVYTNSRYAFATAHWHGEIYRRRGLLTSEGKEIKNKDEILALLKALFLPKRLSIIHCPGHQKGHSAEARGNRMADQAARKAAITETPDTSTLLIENSSPYTSEHF

SEQ ID NO: 431 - protein, 704 aa, synthetic construct
  REGION 1..20
MGSSHHHHHHSSGLVPRGSHMTLNIEDEHRLHETSKEPDVSLGSTWLSDFPQAWAETGGMGLAVRQAPLIIPLKATSTPVSIKQYPMSREARLGIKPHIRRLYDQGILVPCQSPWNTPLRPVKKPGTNDYRPVQDLREVNKRVEDIHPTVPNPYNLLSGLPPSHQWYTVLDLKDAFFCLRLHPTSQPLFAFEWRDPEMGISGQLTWTRLPQGFKNSPTLFDEALHRDLADFRIQHPDLILLQYVDDLLLAATSELDCQQGTRALLQTLGNLGYRASAKKAQICQKQVKYLGYLLKEGQRWITDARKETVMGQPTPKTPRELREFLGKAGFCRLWIPGFAEMAAPLYPLTKTGTLFNWGPDQQKAYQEIKQALLTAPALGLPDLTKPFELFVDEKQGYAKGVLTQKLGPWRRPVAYLSKKLDPVAAGWPPCLRMVAAIAVLTKDAGKLTMGQPLNILAPHAVEALVKQPPDRWLSNARMTHYQALLLDTDRVQFGPVVALNPATLLPLPEEGLQHNCLDILAEAHGTRPDLTDQPLPDADHTWYTGGSSLLQEGQRKAGAAVTTETEVIWAKALPAGTSAQRAQLIALTQALKMAEGKKLNVYTNSRYAFATAHWHGEIYRRRGLLTSEGKEIKNKDEILALLKALFLPKMLSIIHCPGHQKGHSAEARGNRMADQAARKAAITETPDTSTLLIENSSPYTSEHF

SEQ ID NO: 432 - protein, 704 aa, synthetic construct
  REGION 1..20
MGSSHHHHHHSSGLVPRGSHMTLNIEDEHRLHETSKEPDVSLGSTWLSDFPQAWAETGGMGLAVRQAPLIIPLKATSTPVSIKQYPMSREARLGIKPHIRRLYDQGILVPCQSPWNTPLRPVKKPGTNDYRPVQDLREVNKRVEDIHPTVPNPYNLLSGLPPSHQWYTVLDLKDAFFCLRLHPTSQPLFAFEWRDPEMGISGQLTWTRLPQGFKNSPTLFDEALHRDLADFRIQHPDLILLQYVDDLLLAATSELDCQQGTRALLQTLGNLGYRASAKKAQICQKQVKYLGYLLKEGQRWITDARKETVMGQPTPKTPRELREFLGKAGFCRLWIPGFAEMAAPLYPLTKTGTLFNWGPDQQKAYQEIKQALLTAPALGLPDLTKPFELFVDEKQGYAKGVLTQKLGPWRRPVAYLSKKLDPVAAGWPPCLRMVAAIAVLTKDAGKLTMGQPLNILAPHAVEALVKQPPDRWLSNARMTHYQALLLDTDRVQFGPVVALNPATLLPLPEEGLQHNCLDILAEAHGTRPDLTDQPLPDADHTWYTGGSSLLQEGQRKAGAAVTTETEVIWAKALPAGTSAQRAQLIALTQALKMAEGKKLNVYTNSRYAFATAHWHGEIYRRRGLLTSEGKEIKNKDEILALLKALFLPKRLSIIHCPGHQKGHSAEVRGNRMADQAARKAAITETPDTSTLLIENSSPYTSEHF

SEQ ID NO: 433 - DNA, 25 bp, synthetic construct
  source 1..25: mol_type = other DNA
gtcgagtatctcagaaaagaagaca

SEQ ID NO: 434 - DNA, 22 bp, synthetic construct
  source 1..22: mol_type = other DNA
ctcggatgtaggaagtttcacc

SEQ ID NO: 435 - DNA, 24 bp, synthetic construct
  source 1..24: mol_type = other DNA
  misc_feature 9^10: standard_name = ZEN Internal Quencher
  misc_feature 1: standard_name = 5' SUN modification
  misc_feature 24: standard_name = 3' Iowa Black FQ
atgccctgcgtaaactggatgaca

SEQ ID NO: 436 - DNA, 21 bp, synthetic construct
  source 1..21: mol_type = other DNA
gactttgctttccttggtcag

SEQ ID NO: 437 - DNA, 22 bp, synthetic construct
  source 1..22: mol_type = other DNA
ggcttatatccaacacttcgtg

SEQ ID NO: 438 - DNA, 26 bp, synthetic construct
  source 1..26: mol_type = other DNA
  misc_feature 9^10: standard_name = ZEN Internal Quencher
  misc_feature 1: standard_name = 5' 6-FAM (Fluorescein)
  misc_feature 26: standard_name = 3' Iowa Black FQ
atggtcaaggtcgcaagcttgctggt